United States Patent Application Publication US 2025/0268953 A1 - sequence listing, part 6

SEQ ID NO: 35 - DNA, 1027659 bp, Gemmiger sp.
  source 1..1027659: mol_type = genomic DNA
tgctgcctcccgtaggagtctgggccgtgtctcagtcccaatgtggccgatcaacctctcagtccggctaccaatcgtcgccttggtgggccgttacctcaccaactagctaattggacgcgagtccatcctcaagcgaataaatccttttacccctgagccatgcggctctgtggtcttatgcggtattagcagtcgtttccaactgttgtcccccactcgagggcaggttactcacgcgttactcacccgttcgccactaagcttttcaaagcaagctctaaaaagctccgttcgacttgcatgtgttaggcgcgccgccagcgttcgtcctgagccaggatcaaactctttataaatggtatttaatcacttacaaagtgttaaatctctgtaaattctcagacacaatcgcttgcgtcctgtcgaattacttgtttttggaattgtttatcgtgttctttccaaacacgttcaaggttccacaagtttcagtattgttcaattttcaaggtcctgtgccggccgtttctcgcggacagcttatttattatatctcattgagttccgtttgtcaagaactttttgaagattttttgagctgtccggccgtttggccggtgctgtcttgcgacagctttttgattttacctcattcagatctttttgtcaagacctttttgagatttttttaagcggcttttcagtcgcttacttaccgtttcttccgtcctgcccgctcagagcggtgattcagggcccggccgaaccggtgcaattatattaccacggcgccaggacagagtcaagacatttttctccattttttgcctaaagtatcacttttgtcgttttttacagtttctttaccgcaaagcgaacgttttgacgggcgtgttttccagaattatacatagcgtaaagccttttgccgccttgatttcacatagtgtattgttttctcccacaggaagccttttctccctcgtcgcattccccgcgcaataccggattactcttcaccgccggtcagttcactgcgcatccatttcaggatcttgcgttccctgcgggatatctgcacctgcgttgttttcaggacccgtgccgtctcgctctgcgtctttcccccaaagaagcgcagtcgaatcagcagcctgtcctggggctgcagcttattcataacctcattcaggctgatccgttccgaaaggctttcttccggagaatccacagggatatcccactctttaccgctgtcctcgctttccactggtgtcagggacaatgccggcatggacgcccgaatcgccaaagccacctgttccggtgtggtgccgaggacttccgccagctgcgttacgctgggttccactccggtccgtttcagagtacgttcccgttccgcgttgatcttcagccccagttctttcagagttcggctgactttgaccgttccaccatcacggaacagctttttgatctcccccaaaataaccgggaccgcataggtggaaaaacacacgccccgggaagcatcaaacccgtcgcatgccttgaccaggccaaggcatcccgcagcataaaggtcctcgtactcaatgccccgcccccgaaagcgcccggcacagcaatggaccagccccagattgttctgtatgaattctccccgcctggcgcgggactctttgacggaatcggccgccgccggaaattgtgcggacatattcttccctccttataggatacggctgtgcagggtcgcccagcctatgtaaggagtgttatccgcgggcggcaggcagagcatcctgcacgtccagccgcttgaccatcgtgacgcgggtgccgcgtccgggggccgaggtgacccggactttatccataaagctctgcatgaccgcaaatcccagtcccgcacgctcgtctggattgccggtggtatacagaggttccatggcccgggcaacatcggcaataccgacccccttgtccgacacggtgatcctgacgatgccgccctcatacagcgcggcccggagtgtgaccaggccgatagctccggggtaggcatgtacgatacagttggtgactgcctccgacacggcagtcttgatgtccgccagctgcgggaccgtcgggtctgcctggacgagaaaggccgcgagcgccgcccgggcaaaaccttcgtttatgctgcggctgtaaaagctgattttgacctgattgagcattttcataccgatcgcccccacttatacataatggatccgcgcaagatccagcattttgcagatctgcggcggcggattctgcacagtcaggcgtccgcccaaagaagaaatgtatctgccccggccaaggatcagccccacgccggaggaatccataaaggtgaccccgctgaaatccagcgccagcagttccggcatatgggtgtcgatctgagcgtcgatctcccgccgcagcgactgcgccgcgtgatggtcgatctcccccgaaagatacgccgccagggtcccgcccgccgggatgaaccatacctttgccatagcttgtcccccaatttctgactcggcagggccgcagcttatcccgcacagacaaaagcagcgccccgcataccggtttgcatccagtatacggggcgctgcccaaatattttgttatagtatgtcgcggcggagaaaaagaaaaggcacagcgctatataaaacgccgtgccttgatggttcgacagaacgatcagttttctgcttccgtcagcaggatggggcgagcctcggcagcaaggtagaggctgccgcagacaaccacgcccgcaaggttgttgtcgtccgcgtaatccactgccttgcggatggcttcgggaatggtaccgcccacctcggcatcaaaatggaaccgggcctttttatacatttcctccgcagagagtgcccgcggggtactgggggccgtggtgaacaccttggcaaagcaggattccagcttctccaggaagccgtcgcaatccttatccgccaccatgccgatgacgcctaccaggttctcggtatatccggcatcggtcagagcctgctccagccccgaggcgccgtccgggttgtggcagccgtccagcaaaaggagcggatgacggcgcagaacctcaatacgggcgggcaggctggcccggcgcagaccttccaggattgcctcgtccggaatatcatagccgtgttcccgccacagggtcagggcgatctccactgccatggaggcatgattgccctggtggcggcccgggaagttgagcgccacttcgtatccgccgtaatcgatgcggttttccagcgggcggcctttccgccggacaaggtccgccgggtcgggcgtcacgatagaaacatgcttttccgccgccgcagacaggatgggccccattgcctcgggcggctggtccgggtagcagaccacggtgcagccttccttgatgatgcccgccttctcccctgcgatctccgggatggtctctcccagcagggcggtatggtccaggccgatgcgggtgatggcagccaccagcgtattggtcaccacattggtggcatcgtagcgaccgccaaggccggtctccagcaccacaaggtcacaattttcctgggcaaaccacagaaacgccaccgcggtgactgcttcaaactggaccggcgcaggaccgcccgcagcctgtacggcatcggcggcatccagtacccgctcggtcaggtcggccagggtctcaggcgggatcattctgccgtcgatctggaagcgttcccggaaatcggtgacataggggctgatggtcaggcccgtcttatagcctgcctgggtcaggatattcgccgtcatgacggcaagggtacctttcccgttggtccctgcaatatggatacatttcagagagcgctccgggttacccagggcatccatcagggcgcgcatccggtccagcgtgggcttgccgccgctggggatcgcatgcagcgcttcaatcgcctgttgtggcgtcatatggcatcctcctcttcttccggttctgcttcggtttcccggcctgcatctggtgtttccgtgttgtcacgggatgccgtgcggcggatatgggcgtcgcggctgcggcgcagtctgtcacgctcggcgcgcaggcggcggttttcccgtttgatggcataaaacgccgtgatcgcccgcacgatcagcaggatcaccagcgccaccatcagaccggccacaataccggcaaagtcgatccagacgtcggtgagctgggacgaacggccggaaacgtatttctggatggtctcatcggtcacggcggtgagcaggccgcccagcagcggccagctgatatgccgcacaaagcgggcggtatagacccgcagacagagcgtcagcagcaaaccttccagacagtactcggcaaagtgggccagtttgcgcaccgaatgctcagacactgggcccagcccgatacggtcgagaaccgcattcatatagtgcatgaccgcctggctgcgtgctgacgagatggtgccgctttccagcgagttgctgaagatgaaggcaatactggccagaacgccgacggtaaaaataattcgaaatgcaatgagccaagggctcgttttgttttgcgtcatggtattctttcctcctgcacggcagcaaaaggccgtgcttctcccctcctcaggatgcggcacccctgccgctccgtaccgacattatagcatcgcaccgggccgagggcaagccgaaaggccgcgcctgcgggagaatgctctccccgcaggcacggccttttacggcagtttttgcgattggaattttacaaatcagcccagcgcttcaatggactggcggatgttcgcctgcttgtccttggcggcagccagcttggcgcggacgtcctccaccagcttggcaggagccttttccacgaacttggggttggcgagctgattttcaaacatggccagttctttctcgctcttggcaagttccttgttcaggcgggccagctccttctcgcggtcgatgagctccatcatggggatgaagccgcgggcggaggtggtgttgacctgcaccatgccggaggtagagccctcataatggtcggtcagggtcacatcggtggcgaaggcaaagcgggccaggtagacctcgcccttgcggaaggcctcggcgtccgccgtctcgatgatcatgctggtctttttggcgggatggacattcatgtcgttgcgcaccgcacgcaccgccttgatatagtccatcagcttggcgaagtcggcttcctcctccggccagtcgtgggcggcatcgaaggcgggccactgttcgttcatgatggtctcggcgctgccgggcaggctctgataaatggcctcggtgacaaagggcatgaagggatgcagcagcttgagcgcctggctcagcacatacaccagcaccttgcgggcggtgtcggcctgctgctcgtcgccggagttcaggcgagccttgcagatctcgatataccagtcgcagtagacttcccagataaagttttcgatcttgtcggcagccaggcccatctcgtacttttccaggttggccgtggcatcccgggcggtggcgttgagctgggtcagcacccacttgtcgctcatgtccagcagggacacgtcgggcaggccggggacaaagtcctcgggcaggttcatctggacaaagcgggtggcgttccacagcttgttggcaaagttacggcaggccttgacgcgctcctcgctgtagcgcatatcattgccggcggtggagcccaccaccagcatcatgcgcagggcgtcggcaccgtactgggcgatgacctccagggggtcaatgccgttgcccaggctcttggacattttgcggccctggctgtcgcgcacgataccgtgaatgagcacggtatcaaagggcgctttgccggtgtaggccaggccggagaagatcatgcgggagacccagaaaccgatgatgtcgtaaccggtgaccagggtgttggtgggatagaaatactcgaggtcctcggtctccttgggccagcccagggtggagaagggccacagagcgctggagaaccaggtatccagggtgtcggggtcctgggtcaggttggcactgccgcagtgggggcaggtcttgggggcttccttggcgacgatggtctcgccgcagtcggcgcagtaccaggccgggatctgatggccccaccacagctgacggctgatgcaccagtcacgggtgccgtacatccagttgagatagttcttggtgaagcgctccggcacgaacttgatgtcgcccttttccaccgcctcgatggcaggcttggccaggggttccatcttgacgaaccactgcttagacaccatgggttcgatgacggtatggcagcggtagcatgtgccgacctcgtgcttgaggggctcggtggacttgaggtagccgccggcttccaggtcggccagaatggccttgcgggcttccatggcagtcatgccggcatacttgccgcaatcgagaacgtcgggttcgtcggcggcagcgcggccgctggccttgagggcatcggcggcggccttgtcggcagcaccggtcatgtggccgtcgtaggtcagcacgcggatcatgggcaggttgtggcgcttgcccacctcaaagtcgttggggtcgtgggccggggtgatcttgacgacaccggtgcccttttccatgtcggcgtgctcatcgcagacgatggggatctccttattcagcaggggcaggatgacatggcagccatgcagatgggcatagcgggggtcctcggtgttgatggcaacggcggtatcgcccagcatggtctcgggacgggtggtggccagttccagcatctcaccggtctccttgaccttgtagagcaggtgccagaagctgccgtccttctcctcgtactccacctcggcatcggagatggaggtgttgcagtgggggcaccagttgaccatgcggttgccgcggtagatgagccccttgtcgtacaggcggacaaacacgtccttgacggcgtcggagcagccttcgtccatggtgaagcgctcacgctcccagtcgcaggagcagcccagttttttcagctggctgacgatgcggttgccgtatttttctttccatgcccaggcgcgctccaaaaagccgtcgcggcccaccatctccttggtcaggccttcctcctgcatggcggcgacgaccttggcctcggtggcaatggaggcatggtcggtgccggggacccacagcgcggcgtagccctgcatccgcttgtaacggatgaggatgtcctgccaagtctcatccatggcgtggcccatgtgcagctgcccggtaacgttgggcgggggcatcacgatggtgaacggctttttgctgcggtcgatctgcgtgtggaaatatcccttgtcacaccagtcctgatagatgcggtcctcggtgctttggggatcgtactgtttggcgagttcttttgccatatcctgcgtcctcctgtctgtttggtgcgggacgaaaaaagcacggccgtcccgggatgtgaatcctcatgggacggccgtgctgatgcacaaaccgcggtaccacccaaattgcctgcccataccggaacaccggcggcgcaggccccttgaacgcccggtaacgggggcgaaacggagcggactaggacgcatttgcgccgttcccccgccctgcttgaaggtgacagccgcctgcggcctttaccgggtttccacactccccggctttctggaaaaggctgatgcccgcggcactccttcgcactgcatttcgataccgttaagtttagtgcagaacgccgcgcttgtcaagccgccgggcggagttttgcacataccggtgtgcagaaatccctcttttcgccggtatcatccgtttttgatgttgacccggagaagcaggatcgtccccaccacgccgcagacaacacccagcactgcaaaaaaccagggcagcgcggcaaggagttgttcttcctccaaaggaattatattgttcatctgggacggaacgatgcagaatgccatgaaggcgatatacagaaccacaccgcccctggtgccgaaggtccttacaatcccgctgccgaacaccgaaaatgccacgggcagcagtgcggcggaggcccagccccaccacgggatcagcgagatcatatccagcaccgggcgtccgcctgcaaagactgccgcccaaagcatctgcaaaagcacggtagccagcatgatggctgcgccgtataaagcccccaagacccagatgcccgctaccacgcggcggcgggatacgcccaggtttaccgccagagcaaagtagacaccggtcagggtgacgctcatacaaaacaccaccaggataccaccgatgaaagccgccatgccgggaatgcccagggcaacgccctccgagccgaatatctgttccgcgatcagcatcacgaccgaaaccagcaaccacaggccgaactgaatacaccagtatgtcagcatcgtgccgcggcccagacacacctgacgccacacataactcgggaaagaatatccgccttttgtctgtattgcagttgtcacagctgcaccaccgccctttccattcctctgcgggccagcacgccgaacacgatccccggcaccgcaaacaccaggcagacaattgcccagaagggcgtagtcaacgccacggggctgaaaaatgccgggatgtcgtcaaacaggcagaccagttcaatgcccatgcccaagaaccacccggcacaccaagtcacgccccaaatcacgttgcggagcctgccttttgacatctgcatgataaaaagcacgacctgcacctgggagatcgacggaatcaccagcaccgggatcgtatacagtctgacgggcgcgacctcgggggaagcggcaagattggtcagcagcacggtgatccccacaaagaaagcaacaagcagcagccccacgacttccaggctccagaagcagcttgcccgccgggcgccgaaactcatggccaggttggccgttgcccagctgttggagatcatcagtgccggaaagatcacgcagaacatggacatgacgttgccgtaggtttcaaacaaactgatgtccgtcagccgtatcccggccaagagcaatgcggtaaagccgcccagcaccacaacggtgtagaaaatcaattcccgatagagacgaagtacccgggtcattcctcacccctcctcgtcgccgtgaccgcaaagggccacgaacacattctgcaggttcatgcccgccaccgtcagggccgggtcatcggcaagcgccgcaaacagccgggcatcgccgcggacggcggccatcttgtgtgcgcccagttcctgcacctgcaagggctgcacgccgtgtctggcaagtgctgcatccagcgctgtcttttctcccgagacatagcggaactcgtcgatcagttcctcggtgggacggtcggcaatgatgtgtccctcgtccagaacgatgacccgctcaaacacaccggaggcttcctcaatgatatgggtggagaccaggaaggtccggccggtggcggcgtattcctccagcagcatacggtaaaacttttcccgcatgatgacatccaatcccgcggcgggttcgtccagaatggtgatgggagccttggacgccagcgctgccgtgatggtgaccatgctcatctggcctttgctcagcttggcaatgcgctttttgcggtcaatgccgaacttttcgatcaggctgtcggccatggccttgtcccagtgggggcagaacagctgccctgcgtacagatattcctttaccgagatctgggcggtctcggcggtggcgttgagctcccgggcgaagcagagttcgctcagggcacgggggttttcccacaccggttcgccgccgtaggtcaccttgcccgaatccatggtgttctgccccgtcaggatgctgagcagcgtcgtcttgcccgcaccgttgcggccgatcaggccgtaaatgcagcccggttcaatggtgaggttgaggtcatgcagcacctgctgcttgccgtaacttttgcaaaggccctcggcccgcagtacgcggccgtccgccggattggttctttccatcatttcagtccctcctcttgggatacgtcgcccacaagctgcagcagctcttcctgcgacatgcccaggcgcattgcttcccgcacaagggcgcggacctgctccccggcaaaggctttgcgccgccgggcctgcagagttttcagcgcgccctcagccacaaacatgccgatgccccgccgtttgtacaaaaggccttcgtccaccaggcggttgatgcccttggctgctgtggccggattgatattgaaagcccgtgccaattcattggtgctgggcacctggctttcctccggatattccccgcgcagaatcccgtcttccagcatctgcgcgatctgctggtagatcaggttttggtcgttcaggatccctttcaactccggtccccctttctttttcccgcaacggaccttgaaacaggcgtccctgtttgtcggttcattacttgtgtaattaaccataccaccatttagcctttttgtcaatgccctgccggggatcggctgtgattttacatcgttttgcagagcttgccgcgtacaaaaaaaaagaccgtgccgccccgaaacggagtgacacggtctcaaagatttttatagaatgtttgaatgtgcaggcttcagctctgttccaggccatccagccaggccaaaagcagttttccctgccccagcagattgtcagagtatcgctcggcggcctccagcaccacaacgtcgggcaggccatccagttcctcattgatggcatccaccgtcacggcggcagtgtgcagaatcacactctcatcgtagcccgcacagaggaagggcgccatcatctcgccgaagctgtcccggagcatgagcaggctttcgtcaccggtcccctgccagcgcatccggtagccgtccggcgtggtgctgacctgctcggcgcggggcgcgtccacactgtaatagggatcatcccggcacagtgcccacacggcgctgacgttcgccaggtcggtgggagccgcctgttcttgggagatggtgacagcgcagtcctccagcggcgtgagggtatgtcccagaagggcctccgcctgggtcaccgccagataggcgccggtttcgttccagtgggtgtcgtacttataatagacctgctgtcccgccgaagcatcgatcaggtcctgctgcggccagaccagaggaatgtccgctgcgctcagccgttcggccagcgtctgtacacgggtggggcgggaaaccaccgggatgctgtcgggcatatactggctgtaaatgccctccttggccggagcgatgaccaccaccatttttgtgccgtgttccgccagccggtcccgcagggttgacagggtgttgacgaaatcggccagttcttcctccgaataggcggtcagaccctggtagtcagagatgcttttggagtccgagacatccttgagaaacagccaatgctccttgccgagaagcacgtcgctggaatccagcgttcccagcgcccagttcaggcggccgttcagggacatgaactgattgcggaaaggcgcgtggtcgttgagccagtcctcaaaggccccgggccattcctcgacgccggtatcctgagggaacgccgccagcgtccggttttcataatttgtagtgtccaggtgcggggcaagcagcagccaaagaggcgcgggcagcaacagcatgaccacaaacagcaccgtcagaattcttgcccgcttttgagatgaatgttctttcatggcttctcctcctcaaaagcggaaataaatgaacgggttgtaagtgctggacaccagcagcataatgcagccgaacaggcaggccagcatggccgcactctgtaccgggccgggagtctcacggtcgtacagcgcctttttgagccgcggccaaaggcgctgtgccagaccgcacagcagaatgcccgccgccagcagcagaatggtccggccgtccagataacgggtgaccgggtaggccgcactgccctgggtaggcaggatcatggcacgcatccagacaagcccggcacgcaggcccggcgcacggaaaatgacccagcccagcatgacactgacaagggtatacacatggccgatgaccgcaggccagctttccagctttttgcgaagccagatccgctcaatgatcagaaacatgccgtgccagatgccccacgccacaaactgccagttggcgccgtgccacaggccggtgaccagaaagacaatgaaaagattgcgcagcgtttttgccttgccgcggcggttgccgcccagagggatatagaggtaatcccggaaccaggacgacagcgagatatgccaccgccgccaaaactcgctgaccgtgcgggagaggtagggatagttgaagttttcggcgaaatggaagccgaacatttctcccaggccgatggccatatcggagtaaccggaaaagtcataataaatctgaagggtgtagtacaccgcccccagccatgccagcgccgtggaggcactttccggggcaaggccgtagatctcgtctgctttggcggcaaaggcgttcgccagaatgacctttttgccaagaccccagcaaaaacgcttgatgccgtaggccgtctgctcggaaaagagtttgcggttgcccagctgctgctcgatctggccgtactgcacgataggccccgcaatgagctgcgggaaaaagctgatgtacagcgccagacggaaccagtttttctgcaccggataatggccgcggtagagatcgatgacatagctcatggcctggaaggtgtagaagctgatgccgatgggcagtgcaatgtcccgcatgggcaggacctcgctgtgcaaaaggccgtcgatggtatccgccacaaaaccgtagtatttgaagtatcccaacaacagcaggttggcggccaccactgctcccagggcggcttttcgcgccccgccggaagtcttgtcaatgaccagacctcccacccagttcagggtgatcgaccccagcatcaaaaacagatagatcggttccccccagccgtaaaacagcaggcttgccaccagaagcagggcattctgtccccgcagcggcaggactcggcagcccagaaagaccaccggcagaaagatccacaaaaacaccaggcttgaaaacagcacaggctttccccctcaaagtaaaccaaaacatacggggcgtatcccccgtgccataaaaatgagcccccgcagataccgctcatccgcgggggcttgaatacaatactgtgccggaatcaaacggcggtattggtccgtccgtttaggtccgtttcagcgtattttgaccgatcagcccagactgatgcccatggaacgggcaacattgagcatatcgcagtcgtcaggcacgccgcgggtcttaccggcaatatcgatcagcgggttggaggtgacatggcggttgaccatggccaccgtcacaccgtagtgctcgtccgccaccaggcttgccgcgtaggaaccgaactgcgtcgccagcacacggtcgtacgccgagggcgagccgccgcgctgcatatggccggggacacagatacgggtctcggcgccggtcatctgctggatctgcatggcgatgcggttggtggccgtggtataaccagcttccgcacgcttggcggtccattccttgcgcttcatcttggactccgccgtggagagggcgccttccgccaccgccaggatggagaagttcttgcctgccttggcgcgcttttccaccgccgcggcgaccttgtcgatgtcatagggatgctcggggatgaggatgatgtccgcaccgccggcaatgccggaatagagcgtcagccagccggccttgttgcccatgatctcaatgcacataacgcggctgtggctgccggccgtggtatggatgcggtcgatgacctccgtggcaatgtccaccgccgtgtggaaaccgaaggtcacatcggtgccgtagatatcattgtcaatggtcttgggcaggccgatgatgttgaggccttcctggctgagcaggttcgccgttttgtgggtgccgttgccgcccaggcaaagcaggcagtccagcttcgcatccttgtaagtctttttcatggcggcgaccttgtccaccttgtcgtcctcaaccacgcgcatctttttgaacggagtgcgcttggtgccaagaatggtgccgcccaccgtcaggatgccggaaaactccgacgggtccatctcacggtaattgccgttgatcaggccgtcgtagccgttcatgatgccgacgatctcgaccttatcccccatgcgctgatacagtgcttttgccgcaccgcgaatggttgcgttcaggcccgggcagtctccgcccgaggtcaggataccaacacgctttttcattgagaagtacctccctccgcctggccgttgccggccactccggcgttttcgatgccggagctctgccagctgccggcgtctttagtataggttaactgtaccgcgtttttccccgctttgtcaatataaaccggatgctttcccattgtctttttgccagtgcaggcgcctcaaaaagttttttggaaaagtttgaaaaaagctgttgacaaaacaaggttcggtcgctataatagataaacgttgagggcagcgccaaacggcgagcccaaaactccaatggggattcgcataatggtagtgcagcggactctgactccgcccgtgggagttcgatcctctcatccccaaccaaaaccgcagcagcctcgctgctgcggtttttttatcggggtgtagcgcagttggtagcgcgcttggttcgggaccaagaggccgtgggttcaaatcccgccactccgaccatgacgagtgttcttatagcatttgaaacgctgtaagaacactcgtcttttttattgatttcatccggcgatggtggatggggcgtagttgacgactacgccctttcttgtgtttacggacacctccggggcgggcagcgggatgaggtcggggatctcgatggcgcctacgcagttgtagtggatgcggagccgttgctcccacaccccgtctaccttctcggcgttgaacacttcgattttctcgatgagttcgttgagcatccggggcgtcagtttgcgggcgcgggtgtatttgcggaccagagagataaacatatccgtggtcatggactggctgttctgcttgtcgatctcggcgcggagcgccttgatcttctccgccaattccttctgctcctcctcataccgcttcgacattctggcgaaacggtcatccgagagtttgccggaaacattatcctcatagatcctctcgaacaggccgtccagctcctcatcgcgggcttgcagggctttcagctctttctccttcagctttcggtcggtggcctctgcctgctgggaatggccgatcacagccttcacaaactcatcctcaaactgactggaaaatttagttagcctccggatctcgcctaacaccacctgctccaggaagtccacacggatataatgggtagaagtacaggtcccacggttgcccttgtagttggagcagttgaaatacttgatgtcggggttgccctgattgaaatgaaagtgtaggttgtgtccgcaatcagcgcagaccagcaggccggaaaacatattgcgttccccttcgtgggtacggcgcttgcggatcttgccgcgcttctgctggacctgctcaaagaccgcccgctcaatgataggttcgtggacgtccttaaagataacccagttctcccggtcattttcaattcgctttttgttcttgtacgacttggagtaggttttgaaattaaggatgtcgccgcaatactcttgcaaagacagtattttggtaacactggagctgttccactttgtcggagcctgctcctttcctttgccgggccgtttaatgccttttttgagccagtaggcgcggggcgtcaggataccgtcttgttcaagacttgctgcaatctgctctgttccataaccatccaaggtcatacgataaatccgacgaaccacctgggcggcctcctcatccacgatccaccgtttgggattgtcagggtccttgatatagccgtagggaggttgccccatcggctcgcccgcattgcccttgatcttattgctgatccggcgcttcttgctgatgtcacgggcgtaccactcattgaacagattgcggatgggcgccagctcgttctcaccctcagcggtgtcgatgttatccgagaccgctaccaagcgaatgtcgtgctccgggaaaaactcctcggtcagccgccccacctcaatgtagttgcggcccagccgggacagatccttcacaaacacggcggcggccttgccggcggcaagctgttccatcatgtcgttgaaaccggggcggtccatcgtgacgccggagatgccgtcatccaggaagtggaccagattggtgtaacctttttccttcgccaccttggtcagcagtttcttttgatttccgatgctgtaactctcgccctccaggttgtcatcgcgggaaagccgctcatagaggaatgcggttacagcacgggatttgcggttgttcgactgtctcattcagtcctccttcctccgggacagccgaatagcaaatataacttgtctatgttcattataccgccatccgctgtccctgtcagccgggtccgggagatttactttgcctcgctctcggacttcatcagccgcagaaggatgctgcccagggtatccgggccatcttgccgaaaaacaggttcaacgacaaacgacctattgccgaagcgataggtcgtcttttcatctaacgatttcttggaagagccgggcttaccggcaatagttttttcttgcataaaatgaccccctttcgcaagaaagatcaatacgaaagaggcagaaaacggatggctgctggcacagctccacgggaatttcaccccggcccatactgatgggtgcggcgcacgatgctttgcgggcgtccaatgcgcgagtctcattatcctgcctgcgcgtcctcgcccacaggctgccacacctgttttacggcccggttttgtcgctctcctgtttggtaggggtcccgtcctgcggacttgcaacaggatcttggcgcaccggccgaccggctccacacagacagatcgtatccgtctgccttatactgcgccggaggcctcccgccgggctttctttgtcaaggagctataaagggacgccgtgtggaaaggggaacacacagcgcccggccctggatcagctcaggtcaaaatccaggatggagataatcagctttgcttccagccgaccgcgcagatcttcgtccacctggggacggggatagccgtcagggccatagctcgtccgtgtagacagcgcggcgatgtagccggagtaatgccggactacccggctcaccgcttcggggtctcctcccacagcggcggcgatcaccgggtaagggatcagcgatgcccgcgtgcgtgcagatttactcatccgcttcacctcccatcagctccttcagcagccgataggctttatgcctgcgggtgttgaccgtccggcgggccatatccatgtacctggcgatctgttcatcggtcatccgcaggaaccagtgcatcataaagatttcccggtcctcctgggacagccccagaagcgcctcggccagccggtcgtcctcgatcaggatcacggcccctccaatggggaaggtcgtgtattcccacgagtagcggtcataaaccgcaagctgggccatttcagcctcggacagttcctccaaagacgcgaaacgcttttggcggcggctgatctgtcgatagccgttgcaagcctcgcatttcagaatcttcttgcagtagctgtcaaaggcgtactgcttgtgctcgtagtggcggtcaggtttcaagttctcacctcccttcgtgccgggaggcagttcttttcttcccctttcgctcactactcgttcacgagtggtccggtttggccggttttcgggagctatctgaaaaaattttttgccgctcatacttggctcctttcgtttcgttcgggttgacaggccggaacgaaacggggcggggagcggcagcctacgcccaggcgctcaaagggacgggttttgtgagatgtgagccacagcatataaaaagcgagccataactcactttcatgagcatggctcgctgctgcgttattggaatatttttcgtagtggcatgggcgtccgccgcataagcggtaaaccccgccttattttgacctcctttgtgttggcgctctcatccatatctccctttattccgaaatatgagttataactcactttacatgagttgcatggttatttatatgagcggaagcacaccctacaatgatgtagaggtgatgtgtagtgaacaatccgctggatctatttgcatggaaggtgcggtcagaacggaagcgccagcatctaacgcagaagcagttagctgaacgcctcggtatgaacccccgcacgatcatagatttggagacctgccagagtaatccgaaatttgaaacggtggtccttgtcgccaaagaattgaatatcagcgtggacgccgccatcttcccggaaatggtaaatcagacagtctcgaaaacagtcgtggacttctttgccgggaaaagcgaagcagagatcgaaaaatttatcgcgctctgcaaacaggcggaagccttccagaaagacgagtaacgcggtcgggttcgatgtgcccggccgcgttactatttcacccgtttgctatgcgggcagtttattcttcttttgttttgtaagcatttttcagatgctcgaaggactcctggctgatgacatgctccatccggcaggcgtccttttccgccgttacagggtctactccagcctcgatcagccggtcggtaaagaagcggtgcttttcgtagatctgctccgccacttcccgccccacatcggtcaggtgcaggaaatagtcgctgtccatcgtcaggaagcccccgtcccgcagggtcgccaccgcatggcatacgctgggctttgtgacctccaggtgccgggcgacatccacagagcgcaccatgcctaatttgtttttcaataccaggatggcttctaagtaatcttcaccagaggcatacaatttcatcatgagccaccccggttgcctccaacttgccagttagaggattctctttgtagctccaccatgtggcggaacatcccgccccgttccatcaactgctctggtgtgccttcttccgctacatggccatctgccagcaccaccacatgatcggctcccatcaccgtccgcatccggtgtgcgataaccaaaactgtcttatccttgagcagtgcggagagtgcagtctggaggctggtttcgttctctacatccagagaggcagtcgcctcgtccagtagaacgataggggcatttttcaacagggcgcgggcaatagaaatacgctggcgttcacccccggacagagtagagccgttttctcccaccaccgtctggtatccctccggcagacgctgaacaaactcatcgcactgggcggccctggctgcggccatgacctcctcatctgtagcgtccttgcggcccagacggatatttcccataatggtatcgttgaacagcaccacatcttggaacacaatggcataatccttcaacagtgtttccgggtccaccgtggaaatgtccacaccgcccatggtgatggtccctttctgaatgtcccaaaagcgggcggccagtttcgccgtggtgctcttgccgcctccagaggggccgaccagcgcggtcacttcgccctgcttggcggtaaaagtaacgtcggtcagtacatcctctccgtcctgataccggaagcccacatggtcaaagcaaatatcgtggcctttggcttgatactctgttgtaccttcctgtgcgggttcctgctcaatagctttcatacggcggagttggagcattgcgttgaaaatttcactgagctgcatcatcacgccgctgagtgggtcataaatgcgggaagccgtcactaagaacatgagaaaaaagaacaggtttagttctccctgagtcagcagtagcgtccccatcagtacagtggccgggaaccccaatcgaaggagcatctgcgaggaagtaatcatcaggccactggtcatttcatagcagacggaggtatgtacaatcttctccaactttttgtctaaccctgccagataggaattctcctgattattggccttcaaatcccggatgctctccaaaaactcctgtatcccgtcggcggcatccagttttgattggatctttttcaggtccatatggttttgcaggcgtttgctccccacaaggacaaggatcgccaggacaaagggtgacaaaattgccaacgccattctccaatccatgaaaaacaggcacaaacagacgatcacacaactgatggctgttccgaaaatttgtggaatcgtataggcaaagacccgttccaggtcattgcagtcgctcatcatggtagtggtcaggtcggaaaggtcccgcttgccaaaaaaggacagcggaagggtgcgtaatttttcggctaagccgatccgccgctgggcgctttcagcataagccgcaatataggtacagcggtactgaatgtaatgggtcaggaaaataatcaccaatagcaccagacacattccagcataagcccccagcgaaggggtggccgtttccatccccaagagcggctgaagcagctgcatcaccagcattaaaagcagtcccataggcatcatcagactgagtgaggtaaagaccgaggcaatgattccttttttcaaatcctttgcgccctgctcggtcagggcaaaaagtttacgaagcataatgtccctcctttccgatattccaagcaactgaggtctgataatctctccacatagatgcgtagatcccgttctgtgccatcagcgcactatgggttccccgttctgcgatggttccctgttccaataccaaaatctcatcggcgttttgaatggtgggaagccggtgggcaatcatcaggacagtttttcctcttgtcagacgctcaaatgccatctgaattttgtgctcgttttccgggtcagcgaaagcggtggcctcatccagcagaacgatgggggcatccttgaggattgcccgcgcaagagcgatgcgttgctgctccccgccggagagatagacgcccttggttcccagcaccgtgtccacgccctttggtaatttctctaaaatatcatcgcactgggcagccctgagcgcctcctgcacctgctctctggtcgcattcggccgggaggcgcgaacattttcgaggatgcttgccttcagcaaccggctgtcctgaaatacaaaagcgatgcgctccatcagttcccgcttggggatttgagaaaccgggacgcctccaatgcagaccgccccttcctgcacatcccaaaaccgggggatcagggtggcggcggtggtctttccgctccccgaagcgcctaccaaagccacagttttcccctccgggacttgaaacgataggtgagaaagcgcaggcacatttccacctggataggtaaaggtcacattccgaaactccacatcattctgatccggtatccgggcgagcgcgtcctctactacggaagcctctgccagcagggagtcaatccgccgcactgcttcctgtgccatcatacgatgtgtgccggaaaataaaattttgttgaggataccggcactgccggaggtaaacaggatatagaaaatcaaatccagcagaaactcgctgtactgttccgggccaatcaggaggataccagccgggatcagcacagcaaaggaggcattgatgatgacattgaaagccaccatcggtccttggcaggagagcgcatattccgttacattgtccttgtagtacatgatagcggcgtaaaagctcttaaaggagtaaatcgtttgctggaaaaccttgactactgggatgccgcgaacatactctaccgcttcattgttcatctgttccgaagcgtcctggtattttcgcatataggacatagatttctcgctggtcatcagcatttgtaccataaaccccgcaaccagcagaaggatggacaggccgcctaatctccaatcaaagaacaacagcatggccagcatcgtcacagctgtcacggctgatccggtcatatccgggagctggtgcgccaggaagttttccgtctgcgccgtgttctcattgatgattttccgcagtttgccgctgctgttctgggagaaaaaacccaatgggagcgaagccagatggtgcaggatctgggactgcatatttttggccgtgtggaacgcccctagatgggaaaataaaagagccagcgaatagagaagaaagcctcctacggccagacccagcgcggcccagccataaagggtcatcgcctccacatccaccgtactcaagtccggcagggctgccagcacattccgcaggaccagccaaatacacaaaaagggacacagcataagcacagaactgagtccggataaaatacaggccaccactgtcatccagcggtaacgacccccaaactccaaaagtctggagattcctgtttttttcttctgggtcatctcatcatctccttatccacatcaacacgaaagaatccattcagaagtttgcaccgactaaccaaatgatactgtccgtctgcaaaaagcgcaatcgctccagccgaagtctggaatattccgaaatagatttggccgattgcaaaaaaagcacgccgtgaaatcacggcgtgcttaacgtgcttaatatatttttctttatttgttccagaattgtcggcggaactcattgggcgtgacgcccgttttctgatgaaatgcggcggagaaactgctttgcctctcataaccaactagggcagcaatctcactgagctttttttcacggtcggccaataactcttttgctcggtcaatccggcaagccaggataaactcataaatcgtggtaccgtaaagcatacggaacagataggtcagtttcgacttgctcatatagcacatttgggccagacgctggagatccactttggtagagtaattctgaagcagaaaatgtttgaggctttgcatcgcctcctgatcctttgcggatatgctggcggcagtcggggcagatagagtcaggtcattccactccaggagagcggcaagtagatcgaacacctttgcttcatagcgcagacccgcactcccagcctgtggcagataggccgccatctggtgaagaatgctttctacctcagggagcgacactgttccatccagtgcacaggccgctttcttcacctgcgtggtttcttgccccattagtgcaggaagctgttgttcgtaaaactctggcatcaggccaatcccaatacttcggacaggagtatttttagggatcgtatgtccaaaggtcccctcctccaaaaagtagcccaccagattttccggattggtacagggctttgtcagcgcaggctccgcgctacttggagaactaaccgcaaccgtcagagcggcggggtggtgatagtggaaggacatatcctggtggaataccacatcataaatagttaacgagcaggcagcattgatagggtaggtccacagatagccctttccaacccctggctccgggacaaaggtaaagcctaccccgtttttttcctccagccccttcttggccggtttcagccccaactgaggcagatgggaaagacataattgctcaaatcccgtacgcaccggcatcacctcctttttgcaatcgaccaaatgattttcgcaatcggccaaataagtgggtaatctcttgttttcgcagataaaggcattataattttatgagatggttagtttctgctaactgatgatagcacataaaacgagaaaaagcaagggagggcaatatgcgttgaaaaaactgatccattcgttcacagcaagaaaaatcttggaacttctgctgaccttgctgattgtaacctttctctcttttttactggtaaagctctctccggtggatgcggcggaagcctatgcccggagaacttttatgttatacacaccggagcagcttgatgagcttcgggaggagatggggctcaatcagccgcttctggttcagtacggaacatgggtggggaatgcgctccaccttgactttggaacctcactggtcaacggacgctctgttttgggtgaggtgtcccgcgcaatgggcgtcacactgagcattgtattgatagcggcagtcattgaagcggtcggtattcttctggtaggaagcctgtgctactggtgcaggcggaaatgggcgcacctgcttttggtttttgtgtgcatcgtgggcgtatccatcccgccattcttccttgccagttcctttctcgatgtgtttgcagtccgtttcggatggatctccgtggcctccagtacggggctgatgcggtatctgcccgcagccatctgcctggccgtgggcgggattgccctctactctcaacttctctccaaaaatattgagcgggagatgaatgaggattatgcagtgtacgcccgctgccgggggctttccgacatgaggattttgtggacccatgcactgccccatgcgctggccggtctggcgcccagttttttgcagatggttggtatctctctggccggctccgctattgtggagaaaatcttttccctgcccggccttgggtattccatcgtggacagcgtactctaccgggacacgcctatgatacatgccacgatcctgtttctggccttctttctggtgatctgcaacgcggtttccgacattctgcagcggatattccagcgcggccatgctgagggggcggtccaatgaaaaagttacatatcctttttttaagcattttgccggctttggtgatcctgttctgctttttaggctttttggctgctcccaacgatccggaggaggtcgtgattacacagtcctttttggctccctgtgcggagtatccgctgggaactgaccagtatggccggtgcgttctctcccgcatcctgtatggcggttataccacgctgggcatcgtcctgatgggctccgccatcgtcatgacggtcggtatcctgctcggccttctgctgggccagggaaaagcgggacgcaatgtattgtttgaaagtattctgaacgcagttactgccattccgcccatcgcttatctcattattttcatcagcacttggggcaacagtgtttccaccatggtggtggctctcacagtctccctcattctgcggatgatcaagctggtaaagaccaagacggaactggaatacaacaaggcgtatgtcctgtgcgcagtggcctccggcgcttcccgttttcgtattttgctggtccacattctaccaaacctcattcgggatgcgtttcgcttctcctgcctttccgcgggagagatgatcctctccatttccggcttctcctttatcggtctgagtttgggagaaggggtcatcgactggggtagcatggtgtccgaagggcgaacctcgtttggactggcacctgggctggttctctaccccatgctatttattttcctgtgcgtcctgtcgttcaaccttctgggccgccaactggagtcaggagggcgaatcgatgcttgaagtaaaacatctcacagtccgttccaaggagggcaggcctctggtgcgggatgtttcctttaccctcacccccggagagccactgggtctgaccggagccagcggatcgggcaagactacaatcatcaaggcagtcatggggattctgccctatggctgtgttattgaggcgggcgaaattcttctggatgggctgtctctggaaaagcttcccgctcgagagcggcggaaatattgcggaacggtgctcggctttatcccacaaagcccaatgaccgcatttgatcctcacatgagaatcggcgcacagatggtacagaccttccggctccgcttgaatttgccgaaagacaaagcgctgacgctggcccgggaacagctgctggccgtcaatctggaagatgtggaacgaattttgaactcttttcccagccaactctccggcggaatgctccagcgggtatccatggcctgtctgggagggcttgccccgcgctatatccttgcggatgagcctacctcggctttggatgaagaaaaccgggatcaccttcttacgctgctgcgggagatttatcactccgccggcatcctgttcgtatcacacgatgtatcggctttgaaaatgctctgccgggagacagtgattttagagcagggcgccataattgagcggcagaataccgaagcgttgtttactcatccgcagcagtcatggacgcaggcatttgttcatgccgcggaaacccggaaagggggagattggtcatggaaggctttgtagtggatcaggtgtccaaaacttatatggacgaaaaacagcggccataccaggtccttcacgatgtgtctttctcctggtctgctggagaaaatatcgctgttctgggggaaagcggcagcggaaaaagtaccctggcccggcttctgatcggcattgaaaaaccgaacagcggaactattacatggaatggagaagatattacccgctggaaggcgtccacatggcgggagaaacgcagtcatatccaagcggtttttcaggacgcctccgggacactcaacccggctcgctccgtctaccacaatgtggaggaggccctacgcaacttgacgcagttggacaagcggcaaaggcgggcgagaatcgatgaattgatggagctgacccacatggactcccatcttcttcaaattccggttcgtcagctctctggcggcgaacagcgccgcctttctctgctccgggccctctccattcatccgcaatttctggtgctggatgaagtcaccagcgggctggaccttctttccgcagatgctgtactgcaggttctggagcgttaccacgaggaatttggctgtgcctatctgctgattacccacgaccggcagacagcatatcgcatatccagtcggattctcgaattaaaccaaggggtattcgtgcgggaagctgtccgcactgaatccaaataaataatatccaaagaaaggaacatagtcatgaaaaagaaattgctttctctgatttcagcggtgctctgcctctgcatggtattgagtgcctgcggcgggccagccaacaacgatccgtcatcctccatatccgaaagccaaggtggggacaacacccaagacaaaacgcttaccatcgcaaccatgaccgagacaactactctgtctccgctttatatgggtgtttataattactccatgtgcaccatgctctatgaaaccctcctaaaatacgaggatggagaggtcaagggcaatctggctgaatcctactcgttcaatgaggatggaaccgtgatgacgctgacgctccgccaaggaattactttccatgacggaacccccttcaatgccgaggcggtgaaaaagaatctggatttcatgcacagcaacccgcagtatatggcctgccccggtatttacgatatagagagcgtggaagccacggacgagtacactgtcactattacctacccgcacccctactacggttatgcctatgacttctgctggccagatgtaggcggaatgcagtcgcccaatcaaattgtggagggcgatttccagacggttcagggttatgctggcaccggcccctacatctatgaggaatatgtgtctggtgaatacacccgctttgtccgcaacgagaattactggggcgaggaaccctatttcgatgaaatcattgcccggtatatccctgactccacttcccggctacaggcgctccagaccggtgaaattgatctggtttatggtagctccatgatttcctatcaggactaccagcaggccacagctctggatggagttgcaggagccattgcggaaaaggatactcgtgcccgtgatattaccctcaacgcttccagcggtcctctggtggatgcccgagttcgtcaggcggtgtctcacgccatcaataaagaggagttctctgatggcctaacctacggctatgagcggattgcggagatgcctttcccggaaggaaccccctacaccgacgttgagcttacggcatcttacccctacgatcccgaaaaagcagcggccctcttggatgaggctggctgggtaatgaatgaagaaactggcattcgggagaaagacggtgagacacttaacctgacctttatctatgacacggcgcaggattctctggtttcctcctatgccactctgctcaagagccagttagagaaggtcggcatcgggctggaactcaagggcagtgagaagatggagtggtatgccgagatgatggccggcaactttgacattacctattggattggtgagtatgaattttcctcacctcactgcttcttcggtgctatgccctccatgaccccgcataccttctctctgagccaggttgacggctcccaggagttttttgacgctatcactgctgttaagcagacggatgatcctgcagaggttcaggaactctacaattacctcatcaactatgacttgtgtaatgtgattgatattccgttgacctactacaaagacctgattctctacaacaccgacaagattgccggttacgaatttagtggtgtgcctgccttctttgatgtgagtggattacagccagttgcttaaaacaaatttggttttgatgaaagcaaggcccaatgcagatggaaagtctacattgggcctttgctatttagcagaatttgttgctgaaatggcaaacaacaaagttggccaaaatctccgtttcaaattgtagtattagtagagggggaaaatgagggaagggttacggtagcaagcacagccagcgagtacccactggcggattttcggtttagggggacccctgcccctaaacacgaaaattgcttgctgggatagtcccagacccttataagaaacggaggcgaagcggaatggtaaacagaaagcggaacatccagatgaagttctgggtgacggaggaggagaagcggctcatcgacgagaagatggcgcagctccccacaaagcggtatggggcatatctgcggaagatggcgattgacggatacatcattcaggtggacaccaccgacatcaaggagatgacaaaggccctgggctccatcggccggaacatcaatcaaatcgccaagagggtgaacgtcggcggcccaacctatcaagccgatatggaggagatcctggagagattggagcagatatggcagttacaaagacgcatcctattaagtcaacgctgaaagcggccatcgactatatctgcaatcccgacaaaacggacgggaagctgctggtgtcctccttcggctgcactgcggagaccgcagacatcgaatttgcctggacccgccgccatgccatcgacaagggcacgaacctgggccggcatctcatccaggcgtttgaacctggggaggtcacgccggaggaggcccaccggatcggcatggagctggcgcgggaggtcctgggcggcaaatatgaatttgtccttaccacccacatagacaggaatcacgtccataatcacctgattttcaatgcggtcagtttccaggatcaccggcactaccactccaataagcggagctaccatgagatccgccgcaccagcgaccgaatctgcaaggagcatggcctgtccgtcatcgtcccaggccgggacaagggcaagagctacatcgaacaccaggcggaacagaacggcaccagctacaaggcgaagctgcgctccgccatcgaccggctcctgcccggctgcgccggcctggaggacctgctccgccgccttcagcgggaagggtacgaactgaaacggggcaagtacatctccgccagggcaccgggccaggagcggttcacccgattgaaggccctgggcgccgactacgcagaggaggccctgaccgcccggatggccggaaggcccagcccctcccgccagccgaagcagcgcaccgggaagcccagcctgctcatcgacatccagaacaatatcaaggcccaacagagcgccggttacaagcattgggcaaccatcgagaacttgaagcgggcggcggaaacgctgaacttcctgacggagcatggcatcggaagtttggaggacctgtccgagcggtgcgacggggcggcggccgccaccgccagggtgaaggcggacctccgggcaacgaagaaagaaatggagcggctgaccctcactatgaagcacgccgccacctatcgccagctccgtcccctgtatgaggaataccgccagtccagggacaaggagaagttcctccgggggcatgagggcgaaatcatcctgtttgaggcggcggcaagagagctgaaacgcctggacgctgtacccctgcccgccaccaaacggctccgggccgagatggacgggctcaccgccaggcggaccgccctgcaatcggaatatcggaaggcccagcgggaggagcgggagtacgacaccctccgccagaatgtggaggccctgctggaaaagccaagggaagccgaaccgcagaggcagcggaatcacgaactggaataggtaggattgtgcgctttaccggacttttcaaaggcccctgggcgcggtctgattttatctgtataatggagacaggaatggaggcgctgccaatgacgagaaccgaggccgtcaaggactttttcaaaaaggcggttttgcccgtcgccatcgccgggctgctgtactgtattttcaaatccgcctgcatgagggatggggagctggatcttctctggctctggatactctgcggcctgcccttcggcatccatcggatgtgcgtgtggatcgtgccgggcggcgactccctgggcggcggcgccgccctgtttgttctgaacttcgtgatcggcggcatcatcggcggcttcgtcctggtgtggcgcctgctggtggcggcatggtatgtgcccctcaccatctaccgcctgatcgtgggatattgagatggacaaatgatagagagccggctggcattgaccagccggctctcctcatggtgtccgctccagaataaattttgttaccagatccgcatactgttccagccgcaccatcagcgccaggtggccgccggtcaggtcggtgaccaccgtgggacttggcatcagggcgatcaggtcctcccggcaggccggggtgaaggtggtgtcgtcctcggacaaaatcagcagcacccgcccctcccacggggcaaaatcattgcgggtcatgccaaagtagtgttctgcgtcacagagaaagtcaatcatgtgctgttcatagggcttggtgagcagttccatcatagcgccgcacagttcctccatagcggccttttcctgggctgtaaagccatcggttttctttttcatcaccgcccatctcatcatccgcttgatgagcggaaacggcaggaaggcaagccattttttgaacttccgctggctttcgattatcttcatcagatcctgatacccggccttgctcatgttgccggacagcgagcaggtgttggagaggaccagcccctccaccacttccgggtggcgggaggcgatgacctgggccactacgccgcccagggactgtcccaccagccagaccttttccttcaggtggcggagtagttcagccacggcatcggcaaactcgccgttgtccccgaactggagctgatagtcaaaggtcagcaccgaaaaatccctggcgaaccgggcaaagtgcttataaaacaggtcggacagcccaatgccgcccgtgagcaggaccagcgtggctttggcctggggattttgatagtagcgataggtaaagagtttcccgctgctgaccgtgaaggcagcggttggataaacccggcgaaattctgcaagtgtcatggaactcctcctttcagatccaggtgagcagatacccgttgattaaagcaacagccaaaaacagaagaactccccgcaggaaagcgtaaaagtgtttgcgggggtccgcatataattccggactttcctcggtgccggaaaaccgcacccgttttgtgtgccgccaccaaagcaggtcgatcaccaaaaaatcaaacagattcagcgcctgtcctaaaagcagagtgttcaaaaagttgcctgcaaaatattcctgccgggtgagaagccccatcgcaaacaggagcgcagtaaacaaaagcagatttccagcgaagatggccgcaggacctcgctgccgaatatttcctgatagctccgggcgggctttcacaatcttctgtacctcgtccgggtaagtagaaaaattacggatgtttttctcgtcgctcccggtgcccagccagcaaaaagcccaaaacaaggaacacaggagcataccctctgccagcagcatttgaaccatcttccatctcccgatttctattttccctgccgttctttgtcccaacgggaaccctttttgcagatataaaagtcacagcagtcaccgccggcagccagcgttttggtacggtagagccgcccacccatccagtcgacggacatcgtgtccagagcgcatagatagggaaccagatgaggaaggccctcctgtcggcccagggcacacagaccgcactggtggtaaaggatcgtatattcctctgcatcccggccgaagatgacctcggcattccactgaaaggggttcctatctgcatccgccaaagatgcagtcgctgctcgcttatattgagccttcaaagtaaatgcagtcttggctttgccccggaaggcagccacaaccagaggagaacgcatactggcacttaccatgccctcaaagcgcttttcactcattttttcttctgccgccttatagattgacagccatagaattccaccagtcaggcagacccgcaacgggttttccatcatggagccaatatccggggtacgggataccatttgccggtaaatctgcttagagagctgcttcaacgcagaaatatcccatcccaactcctgccttgccagataccgaaatgcggcaggagcgatggcagcccacatcagcctttcacaatatgtataggtcatgacaaacctccgtcttacttccgccccaccagcatccgggagtcgcccagcatcatcatgcccgcccgccggcgggagccgaagacctccgtggccgtgtcgatgaggcgcacgtcctcatagcccatgtcccgcagcttttggacaaaggcatccatgtccccgtacatttttggcttcatgtcatcgttgagcgcaaagacgccgccctttttcagcacccgcagggtctccaacagcagagcctgcttgtccgcacccattacattgtggtagacatagttgctcaccacggcgtcgaaactctcatcagggaaatccagcttgttggcatccccgtgccggaacgcacacctgaagccgacgccctcgctctcggcatttttctcgcacatggcctgaccatagccgtaggccacaccccaatagtccatgccggtgatttgggcgtccggccaggtgagcgccgcccgtatgctcagtgcgccggagccgcatccaacctccagaagttgtccctgcccgtcaaaatccagatgggagaggacgacctgatggacccgctccatcattcctccgccgccgaaagcgtactgtttccgtatccatgcacaccagatcagcagggcaagcagcgccgctgcggcaacagagaacaggatgccgagcgcggcaatatgaaacatggaaaaggatagcgctgccagcaccgccgacagggtcaacagcccaccgatcatgtaaaaaaccgggttagacatccagcttccgtagtcctcgccgtgggtgccgagtcggattattttttgttgcttttgatgttgtttcatttgaaccatctcctatcctatcttttgcaataacagccccaatcccgcctgagccgccgccatgagcgggcacagcagtagcggccattggagcaggtgctctggcagcgcatagcccttcatccagtctgtgaactcatagccgggatgtccctctgtaccagggatcacaaaacggtctttcgcttttttctggatcagccacacatccagaaaaagaagatcgcctatgttgatcatcatccactggatgtatcccatcagggatagacgccagaatccggttgtcccgccctccacagcgctgaccgcaccataaagaaggagaggcagcagctctccaaagcagatccaaagccagtaaaaacggttttcctctctggtaggcggcctgttcgccgccttgatgatggcgggcggatagctgggaaacatcagccggggctgatacagcgccaccgtagcggcaaataggttaaagtaggccgccatggcaagcccgtccaggatggtgcgcgtccagttcatggaaattctcctgccctactgcgtttttcataaggaactctctgttatggatttgccccgtattctaccggatcgccagcgcacagagccagtgctttttggcgtctttatccatgatgaccttagaaaaaccagcctcggtgagaaaacgggcaagctggtctccattgtagattctcatcccatcaatgacagaaagccatttgttgtcctgggagttttccccgtccgactcattgacgattaaaaaaatgccgcccggttgcagggtgcggtacacctcccggaaactctccaccgggccaggccagaaatatacggtttcaaatgcggtcgccagatcaaacgaaccatccccaaaggggaggcgggatacatctccctgcaaaatctggcagcggccggcttgcagaccctcacgattgaccctcttagccttttctacggatatttctgaataatccagagcagtaatagttgcagccggatattttcgcagaagcgcccgaatattccgaccgccgccgcagcccagctccgcgatttgagaggggccggtttccggcaaacggctgaggccccagtccgccagggcagcatgggcgtgattcatgctgtccaccatgcacctgccaagcagcccttccggcttgcgggtattattaaaaaaagttttccatatccccataactgcctccatatatcgaaattaaggttagcattaactaaccacacttattatacatcttatctcgcagaagcgcaacacaaagaacattttcaaccattttacacgatgaaaatgtggaaaacggccgctccgccgatggaaaacagatattcacggcccgatggaaaagccgccggctttcccacagcccgcaaacatcgtttcccacagttccgcaagcatgaccgtttacgcacattcccacagcgcctactacggcgaatatccttcccgtccgatcctgattgaaagagaaaaaagagaacaaaaaaagaagcgggagcgtcaccctcggcctaaaccgaaggcggcgctcccactctgttatggaaaagtgttcaaaacagcctctttgtcccccctcaaatcagagggagaggcccacatggggaaatcataagggcggctcccagaaaagccgccacaggcgatttttcagcccgttttcaacccctattcccgcattttttcgagcgtgcggactggtaatggggacaggcgatgaggactgcccggaagctctgcttgcagggatggacacaacccttgcagatcttgttatatctgcggcggccgttctccccgaggaagaaggaccattccagccgccacttcttgctccggctcacaggtcatgctccgggggcttcttctgctgggccctgtccgggggcttgcgctcgccgcactcccgtttggcctccgccagccgctcccggatggagggctttttctccggcgtggtcctgcgcgcctcaccctgggccttctccagctcctcacccctgcggccgttgttcagcaccccgtcgatcatcccgtagtcgtcctccagggtcatctctgcggtgcggagcgggttctccggctccgatggcagggcgatgatctgcccgttcaggctgatgaactgctccggctgcttgaagtgctccgtgtacttctgcacctgctccggggtcagggaggtgaagctgtcctcactcagccccaccaccaggaaggtgccggccatgacgtcataaatctccccatgctcatcccgcaggccccggttcagctccagaccaatgagcttgccctcatcgttgcagaccagccccaccgggtcggagaagggataagcggtggcaatatcgccgcccacctccgcctgtaacgaatggaggccggggtcgatctccttcacatagggttccttcataggctccaccaccaggacggtcatcttctccggggcggcgtgctcctgggcctcctcgctgcggatagcgaaggaacgggaaccgttgcccatgatgaggtacttcccatcgtcagactgatggtggaagccgtacccggccgcctccatctgctcccggctcatatccgtcacatagaaggtgcccctgggagtccgcaccgtttcgccggtctcccggtcatccggggagggcgccggggtctgtccggccagctccgcctcatactcccggcccgcctgctctgcaaaggccagcatctcgtccacatgggacttgtccgggtcctccaatgccgctttgattacagccggatcaaagtcaagaaattcctcatagccggtggcgtctttgaatttctcaatctccgaagggagatagtcctcctgggtctgccccagggcggccagcttctcatccagggcggaaatgcggccggccatcagattttcgtagatctcctccttggccgcgtgctcctccgggtgctcggcggcatactgcgggtcgtgctggcggaagaactcgtccatatcgtaggcgatgtccatcgcccattcggatttttcctcctcggtcagctcctccgcgtcctggaaggtcatcacccggtattcctccgggatgctgccatgctccccatcgtaatactcatggaagctgctcccggtgtcccgcacataccccaggtcggtgaactcgccgccctcctccagggcgacgtcccggccgtaggcctcatagtcgatgtagttccgcaggtgctccggcacctgcatggcgtccagctcctcgatgtaataccggcccaggtcgtcgtggtcgtggatgtcggggtaaatgtcgtagcagtccaggttctcggtcaggttgatgatctcctgcaagctgcccgaatggtcgccgatctccatcgccgcctggaactgttcgtactcgccctggctcatctcgtccagtttggaggccaggtagttgagctcgtccaggttctcatactcgcccagcttgtcgtagaggccgtccacatagcagtcatagtcagtgatgaaccactcctcatagggctggccgaagtcatccttctgcccaatgccgatccgttcaaacaccttctgcatctcctctggcgtggtggggaacttcacccattcgcccaccaggtcgccctcgttgtacttgcccaggttggtgatgaaggcggcaaagggataatccttgtcatattcataatggggcatatacgcacctccttacagctccggctcagacttccccttgcggggcgcctgggccttatttttgttcctgcactcctgtttgctctgttccagccgctccctgatggagggcttgcggtccgcctgcttcgcctgggggcggtcgtgctgccatgggtcatccgtggggaacagatacccccggctggtgaagcacccccggtcctcctccagggcgcgccggccgaagggggcggggtcaatggcggcccggaggtcgtccgtcaggccgatggtcagtttctcctccaggtactcccagcccaggtcctccagggtccgaacatggggctccagcacgaagcagtccacatttttctcaaattccaggaactgctccgccgtggtcagccgatagggggactcctggacagcagccagaaggtcccggtcctcctgggatagggcggcaacggctttcgctaccgccgccagctcctcccggctcatgttctgttcagcgccgcccagggaaatatccgggattgctttatctgccattcacgccctccttccgtttggggaactccaatttgaagcggacatacttctcgccggtatcgtccagcaccaccaccgcgtcataggcggcgcccttcttttcagaccacatccccttgacggaggtgcggcccttcttcaaaaggtcgccggccatcttttttgtcagctccttcttgcgggaggtccagaagcggtcgtccttccaaaggacaaagcggcaggcgcggtcggagcagtaaaaattcttcctgccctcatagaccggcttgccgcaacgggggcagagacccacggcctcccgctccggggcgaacagcttctggccctcctcggagatgtgggaataggttttcaccagttcccgcgccatgtcagagatccccgccatgaaagcggcgggatcgccctcacccctggcgatggcggtcagcttatgctcccactccgccgtgagcatgggagaggtcaaagtatccggcaggacggtgaccaggttgatccccgccttggtagggatgagacttttccctttgcgctccacaaacccggccgccaccagcttctccaggatcgccgccctggtggccggggtgcccaggcccttgcgctcggcgtcctccggcatctcctctttcccggcagtctccatcgccgccaggagggtgtcctccgtgtacgccttgggcggggcggtgaagtgttcggtgacagcggcctccacctggtcaaaaagttgaccctcggtgaagtccggcagagcggcgggttccgcctcgccctccggctgctccttcagggaagcgcggaaaatgtggtcgatctcacgccagccctcggagaggatgcgccgccccttggcggtgaaggtctgcccgccgcaggtaaaggtcgccgtcaccgcctcgtacacatagggctccgcaaccgcgcacagcagctcccggcacaccagcagaaggatattgcgctcacccacgggcagttcggacaggtccgccttctccagctccagcgtggggatgatggcgtggtggtcggacaccttcttgtcatttaccagcaaggacacatccgggaagaactccccgcacccgtcaaagggcggtaccttggccgccaggtggaggaccaccgaagcggtctccgccatgtcggcggtcaaaaaccggctgtccgtccggggataggtcagcagctttttctcatagagggattgtgcgtagtccagcgtctgtttcgccgtgtagccgaagatgcggttggcctcccgctggagggtggtcaggtcgtagagcctgggcggtgcctctttcttctgttcacgggtgacggaagcgcagactgcctccgcgccggcacaggccgccctcagggcctccgcctcctccggggcggcgatcttctccgacaccgcctcggccccgcccagggtcaggcgcacatgatggtatttctctttgcggaacattgtgattttgctgtcccggtccaccagcatggcaagggtgggggtctgcacccgccccacattcagggtgcggtggtagaggacagaaaaaagtcttgtggcgttgatcccaatgagccagtctgctttctggcggcagagggcggactggtacagcgggtcatactccgcgccggggcgcaggtcctggaagccctcccggatcgccgcgtcctccatggaagagatccacagacgggagaagggcttctggcatcccgccatctcatagaccagccggaagatgagctcgccctcccgcccggcgtcgcaggcgttgaccagctcggtgacgtcctctcgctccatgaggtgcttcaagttctggaaggcgtcctccttgcccttcgccagcacatagcggaagggctccggcaggatgggaaggtcatcatacttccatttcttataaccaaggtcgtacccggctgcgtccatcggggacaccaaatgccctacgcaccaggaaacgatgagcccatttccttcaaaacagccatcggccctggatgtgacacccagggccgacgcgacggcttttgcaacactcggtttctcacagatcaccagcttcatttcgtatcctccatttcttcctccggttccggttcgtcctcgttgatatactcctcctcatccgcaaaatcatagtcgtccgggtctgcgctgaccttggacgcctgcttgggacggataaacttgatataggcgaaggctccgccgccgcccagcaccaccagcgccaggaccagcgccagggcgcccatgcccccggacttctccgcctccggctccggttcgggttccggctccggctccgcgccggcgcactcggccatattcaccgcgcacacctcgcaggaggtgttcaccgccccggcctggcatttctccgtacaggtgcagaccgccggcgcctcctgggcctcgccatcctccatcagtgccaggaggtccgcctcgtccacctggttcaggaagtggacggtctgcgccccctcgtcatcccggtcgatgatgagatagaacacgttgccgccctttgtctccaccgtgatgaactgcttgccggaggatgtcccgcccaggtcgtcaatgagggacaggttcccatccggggtcagggctgcccctccgcccccggagaggccggaggcgaacagctccagcagggcggagaggtccgtcccgtccagggagagggagaagctgcccgtgtccgtgatggtcaggtagtcggaatgaacatagccctcccgctccggcagaagcaccttgacccattcgccctcggtgccgatgacttctacctgcgccccatcgggaagctgggtgaaggcgtcgttatccagcccagcgccggtgcggacattcaggttgccgccgcaggtggtcacggtgccggtctgctgggtttcccatttctccgtgtcaggggtgaacaggataccgtcctcggtgacagtcacagtccccaggccgcccagcagttcggtgatctggtccagggtgtccccgtctgcctccgtgttattgtccgcgctatcatcgccggcgggatcttcctcatcagtgatagtgacctccggggcctcggcgtcctccgcagggtccgcctccgtcccggcagtttcggtgtagtagggttcgccctccccaccgccggcgaaagcggggacagcaaaggccgtggcacagagcgccacggccagggccgccgtaaacaggcggatgatcttcttattcttcatactcggtatcctccatctcattctcgccggggtccgccgcggcctccgcctccatcatgccctccggcagggtgatgaggccgctggcgtaggccttcaggaaggccgtcagttcccggttgtccatcttcaccgccttgaccatgcggacgatctccaggttctcctcctcggtgagctgggcctccagggcgcggaggcgcttctgctgctcggagattttctccttggtcttttcaatgtcacggcggatcttctcaacagttgccatgtgtgcaaaactcctttccatatcgttctttccatgaatagttacggcccaggccctggaccgttttcaaattggggcgggcgttgtcctccagggcgatggcccttcggaacaggtccgggtggtggtcccgcaggtggatgatctcctccgccctcatgctggggcagaagaagcaggaggatttgcccggctggggcagacccgcattttcaatggcctgcatacacgctgcccggtcccatccccattccatcaggggataccacttgctgtacttggggtcggccaggtcgcccagcagcaccttgtcgctgcggtagccctcgccggcgtcgtagccgatgaatttcaccacccgcttgcccgctgcccataccttttggcagggcaaatagtgattgcagaacttttcctgcggcccgatcttgtgtttcagggaacaccgcttgaagccgtaggcgatggagggcagggtgccgctctgcaagcactcctgctccagggtcagccgcttgctgtcccgcgtggttttatacactctggtaatgggcggcatcccgtggtccttcagccagcggtccatgatgtccaggtaggcataggtgtggggatgctccgccccggtatccgcaaagaggatcaggtccaccgggatgcggtgctggtgcaggccgatcaaaagggcggtgctgttgacaccgcccccgtaggaaaccatattgatgctttaccacctcccatcagttgtacggcggccggccgtaggcataaaagtgagactgccagtagctggtgttcaaattggtgtaggaaatcggatctccacagtgcaacatcatattgtcgcccacatagatgcccacatgggagataccgctggtgtcataggtgcccacaaagaacaccaggtcgcccggctgggggtcggagaccggcgtggagatgttatagagcccctgggcgcccagccgcccggtgttgcacaggccggtattggtcagcacatagctgacgaagccggaacagtcaaaggaggtctccgggctgctcccgccccagacataagggtatcccaggtatttctccgcctcggtgatgagggtggcgaaccgctcatccgtcaggtactcggcgggaatgtcccaggccgtgggcgggttctcaatgtacttgcccacatacccggaggacgggaacaggtccggtcggttgcccagggtggacatatacacggcgtacatggagagctggtcctcgcccatgatatagaccggcacatgggagaggtcgaaattctccagcgtgacggtgcagatgtaccaggtgtagggaacctctacctcgtactcgttgccctcgctgtccgtcctcgtttctgtccgataccgtgtttcagtggtcacggtctcggtgaggatgtactgcttgtcaaagagcatttccagatccccttgcacctcgtccagggtgaacaccccctcgtgaagcgccgacaggatggacagcagcacataggggtcatgctcgatctcgtccaggtcaaagtggtactcgtcgtagtcgtgggtggcctcgtaggtgtccaggtattcttgcagctccgcctccatctcgcagtaggcggcctcggccccggtcaggtccgcgtcctccgaaagataggaggaggccaccaggccggaagtcccgcccccgaacatggaggtgcaggactgcatcagccccatgatgagcatgaggatcaagccaatcccgcccacaatgaggagggtgtgtttgttcttggtgacgaagccgcccagcttctgggcgatggtcccgccgcccttcttcgctgcggaggcggcggtctgggacgccttgcccgcggcctgggccgcgccggtccctgcccggtgggcggcggcgtactgcttttgcaggcgcttcttctgccacagccgggagatgggattgctggacgcaagctgggggttctccataacggacttctgccaatagaaatccgcattggccttcaccgctacctgctccgcttttgatacatcccgccagggtttcagcttacagttcgcacgcgcctggtggaagcggcggccgccatagcccacggccttctcgatctgccgctcccccaggtggccggcctggacgccggagttgtcgccctccaccttgctcacctcgccgtggagggtggacttgacctcctgcaccggccgggataagggattgccatgctccttgccgggaggcttcacggggacggcggcctttgccgcatccagcttatccgccgccttgtcggactttcggacagcctttttcagctccggcgccgcccggtctgcctcggaaaactgcaaacgggaggaagggcggtccctggccgcctcaccatcccggaaggtgtcgcgccgcttgcgccgcgcctttttcgcctggcggcgttccacatggcccgccgcctcgtccaccgcccggctcagcacaccggcggtctcatcagcagaggaatagtcctgctccgggggacggtccgaaacatgggtggcctcgccggtcaccaggttcaccgaaatggccccgtcacgggtcatcttctgagcctccttctcggaggctttccattcctgcatttatccgtcacctcctccataggggcagatgccggcgcacgccccggtctcgatcatggaaatatagtgaaaaatgggataggcctggggcgggcagaccgcgttgcccagggttttcagccgcagggcccggtcctttgtgtcctccgttatgcgggggacgccctccggctcgccggcccagaggatacggccgtccatcctttcgggaagcccatgagccattccacccaatccgggttcagcgccgccttctccgacaggggctgctcctggtggatcacctgggccgaaaggttgctggacgggggcttgccccggaaggccgccggtttcaaggtggagcggtagccctccgacgccgccggcgtcgggtagaacaccgccgccgaaaggctcaggctccagatcgtcccgtccctgttccgcttgcggaagattccattgtccgacaggaacacatccaggtttgccgcgtccctgcaggtggatttgtcggaggcaaggggcgtgggaaacatcagccgcgacgataaaagttcgttggcgctcatgccacgcgccgacgccgcaagccggaaatacgaatgggagaacagcgtatcccgcttttgccaggtcaaaaatcgttttgtcgagccccatattgatgaagccagcaacattttccccaagcacccaacggggccgcagctcggtaataactctgcacatttccggccacaggtagcgttcatccgcaaagcccttccgctttcccgcggtggagaagggctggcaggggaagccgccggagatgatggtgactgtttcaagtcctgttttctcaaaaaacgcctccttcgtaaatgtggtgatgtcccgaaacttcggcacgtccggccagtgccgctccaggacggaatagggatagtccgcccattcacactggcagacggtcacgaacccggccgcctccgccgccaggtccaggccgccgatgccggagaacaggctcacatgggtcagtcgctccatacctcgtccccttcaaggtccccctcgtcctggggctcctccgcatcctccaggcggaccaggttatggcggcggatgatggactcctccaggacgtcctgggcggcattgctgtcctccgggaggcccaggctgcggaagagctttttcagcaccttttcatagccgccggcctttttcttcagccggaggaagtccttctccgtttccgcctcggacaggcggcgggccagcgaatagtagaggacgatcaggtggtggatgtcgcccaccagcatacggaagccatagccggggatgatgtactcatccttatacttcttgggcttcggctcctccacgggcaccggggtggcctccgccagctcctttgccataaggtcctttaggtctttggggtcgccgaataccaggtagcggccggggatgccccagccctggaatttctcctcggcgatctcgccgtagcgcttcgccgcgtccagcacatggaacacgtcctcctcgtccttgatccggcccgccaggaaggcgagctggtggagaaggccgtacaggtggacctcatcgttgatgtggttgagataggtcttgccgtcgataatgtaaatcttgtttttcatattcacgcctcgctttcacaaaaatcaaattccatgctcatctgcccgccgcagagcatcatccgcaggaggtccttcccctggggcgtgataagggtctgctggcggaaatgcccgtacttccagaagtccttcacctggaacagccccttattggagggcttggcgtagggcagaaggtatccggccgggcagcggtagaggaagccctcctccatcaggaagcggcagaagtcgcgctcgcccacgcccagctccttggctgtggcccggatattggtgcagttgccggggcgcacaaaggcgtcgtaaaaatccgctttcggccgcagccgttccacctccccggtaaggcggcggttcttctcatgctccgccaggagctggtccgcaaaggagagaaggatctccgggtgcctggccgcctcctccagcagggagggcgtcatgtagcccccggtcctgcggatcgtgggaagcacctcatcgaacacccatttctcaaaccgctccgcgccgggcagccggctatgaacgatcaggcggtagacgtcgccctccgggaggaaggtcattgtctggtcaccgcttgcggtggggatggaacgtttcgttccacccctcgcatggtcacggacagcctttcggggattgctgtaccccagggcctttgccacatccgaaccgcagaacaggtatttcccgtcctcctcgatcacgcggatactgccaaattcactgtttctgaatatctccatgttcatattcacgcctccgtttccgccgcgtgctccacctcgctgggcttggtggtaagcagtttataaagctccgtgtcctttgggaagtcgtccgcaaagggcaggatcacattgttgaagaacagcagcccatggcccggctcggaattggtcacataggcaagctgttccgccgaaatgcccagccgctccgccaaaatcttgcggtcgccggcggcctggttgagcatatagatgaaatcgctgttttccaggatgttctcgatctccggggaggagagcaggtccttggggttctgggtcgccccggtgggcaccccgccccattttctaaaccgtttccagatctccgccgaataggccgccgtctgctcctccttcagcaggaggtggaactcgtccacgaaataccaggtggagcgcccaatggcccggttgatggtgacggtgttccacaccgcatcctggacaatgagcatccccggctttttcaggtttttgcccagacccttgatgtcaaagcagacaaggcggttgcggatgtccacggtagtgcggtgattaaagaagttcagcgaaccgttcacatacaggtccaatgcctgggccacacggtcggcctccgggatgccctgcgccagtagcgcctccatcaggtcgcccaggatgggcatattctccggccgggggtcggcaaagtagggctggtagatcttctgcaccgcccggtcgatgacggttttctcgatggcctccagcccggtcttgcttcccatgatgagctcgcagaaggacaggacaaaatcacttttcagcgccagggggttctcctcatccgaataattcaggttgatgtccagggggttcacatagtcggtgctggacggggacagccggatcacctgcccgcccagtcggcgcaccaggggcgaatactcgtcctccgggtcgcagatgatgacattatcttttgtggtcaggatgatgaaggtgatctcccgcttgcagctcatggatttgccgctgcccggcgtgccgaacaccagcccgttggggctcctggactgtttacggtccagaaggatcatgttgttggagagggcgttcaggccgtagtacatggcgtccccgcccataaacagctcctgggtgacgaagggcacgaacaccgccagcgccgaagtggtgaggcttctctcgattttgatacggttgaggcccagggggaggctgctcatcagcccgtcctcctgctggaagtccagccgggtgaggaggcagttgtaggtctgcgccacgctggccgcctgggacacggcgatctccagcttctgctttgtctccgccatgtgcatgaccaggaaggtcaggttgaacatccgctcattcctgctttgcagatcctggaggatggtctttgccgcgccgccgtaggtggcaaggtcgctggggaggatgtccatgtcgtagccgctgcgtaccgcccgcttctgctccgcgatcttcatggcgtccaaatccgtgatcttgcgcttgaccatcttgatggcctcgttctggttgatgccccggatgtgcatagttaccaggatgttgccctcggtctccataaactccgccaaaatgcggtcgtggatctccggggcggtgatctgcaaaaagctcaccgcgccgtacatctccccaatgcggaaggtgcgggtctccccgaagtggaaggaggacggggcgatgaagtccttgaccgaaaggccgctgggcgccagccagtcccaatcgaaggcgaacttcccgccctccggacggcggccgtctgccgggtggaggatgccgtgaagcagctccagccgctctttcccgtccagcacatgggcggcggcgcccatgaccttgaagcggttgagggtgtcggtctcgatacgggcgaaccgcgcccgcgccgccgccaggttctccgcctcgatggtcagagtcacatacttggttttcacatagccgttgctgccccgctcatactggaagcggagtatcccggccgcatcctcccggacagggtccaggtcgtcaccctggggacggatgccgaacaggtcctcctccggcccatgctccacataccggctgctgagcgacacctgcaccccgatggtggggtcgtagccgttgtagaaatcgcagaggtgttcaaaaatatcccgctggtcctccggagaagccaggcggtagttgacgtcctcgaatgcaatcgtcttggagaaggccccgccctccagccggcacaggccgtccgggaacatattgcggaaggggatgctgtcctgcaccgtatgggctttcccgtcccccttggcctggcggaccaccgcctcgatctgcttacgctcggcgcgggtcagcttacgccttgcccctgccggttttgcgggtcttgccgtttttgcctgcaatcgctctcacctcctgttccaattcgtactgccgcaccagggcggagtacaggttgttggtctggtagatccgcgtctttgggcggataaatttattttcaatgagatgtcccaggaacacctccaggggctgcccgttcttctcgtacatggcgaacaggaagaagggcagcatgaccaaaatcatgcagagcgccgccgtggtggtgcccagcgcccctttggtcaaaaagaaaagcggcacgccgataattgctgccgctccaaaacatatcacctgccgtttggtcagcccgaacaggaccttgctctgtaccttgctcaggtccttcgggatcgttacataggccaatcaatgcacctcctttttcatgggagcatagtccttgaaatcttttaccgtgtggaaaatccgtttgttgttcacccaccgctgaagatggcgggtgatctttggagcggtgggacgctcgtagatcattacataggggtcataccccagggcccgcagggtgttcacccggtagaggtcctgctcatgggtgctgccgtagttggtcagcacatacacccgccggttgcggtcgcttcggatggcggtatgcgccacaaagcgtttgaagtgctccgtcaagtcctcctccgggttgtcccaggcgaaatgcaccgccttggtccgcaccttgttcagcagggcgatgttatccaggttcgtcagccggatgtccagtccctgggtgaagtccaccagcgcccggctggcggcaagctgttccagcagcgcctcatggtccgggcaggccagcaggttggggtccagcagtttgatctcatcctcaccgcaccaaaattcagacaggtcagcgactttgacgctcctgcgtccctccttgccgctgacgatgcaaaatccgcagttcctcggacagccccggctcaaaaagccgtaggccgttcccaaaaaccgcggatacaaaaagtagtccggccggatgtgctcgatctcataggggaggtcttttccgcccggcccgtagccggtgccgccttggatgaccttctccgcgttgttcaccacgatggtgtccttggagtaggtgtccgtgaacacccggctcttgtaaaccaggtcatagcgtcccttggggctccaccactccacccggtcgccccgcctggtatggtactcggagagcttcatcaggcagaggttgggaaagttgtgggagtccacgtctatcaatcctattttcaatcatcccccccctttagtgcgccccgaacagggactttgcgaggctgccggtcttaaagagggtgaagcacaggagcaccgtgtaccccatgcacccccagatggcgccggaaatgttgtcgccgctcagggagatgccctccaccagcaccgcgtagatgcccacgcagatcataatgaggaacgcctggaagcccagggccagcagggagcggagatagttctgccccgtgttgccccattcccggttcaccatcgtggcaaaggggatgggacctatcgaggtcaccaaatacacctcgatcatcctgccatagatcaccaggaagatgcagatggagaggatctgcgtacacagccccacgaagatgctctggaaccacagccccagcagggcgccgatgctccagtccgcgagctgggtctccaggtcggcggtcacgccggatatgtcgatgcccgcgtccgagatgatgacgccggcgctctggctgaccacgttctgcgccacatcgaacaccgccatgacgatgttccaggtgttggtgacgatgagcaccgcgcagaaggtcttgaagatccacttgaagaagatccaggtgtcgaagtcgtggaggttgttcttttctacgatgagctggatcagctcatagcacatgacaaaggtgaggacgatgccggcgatggggacgatcacggtctccgagagattgcgaaccatgttgaaaatgccgctgttccacgcggagggcgtcatgcccacctccccggcgatctcgcccaccttggtattcagggtatcaaacatcccggtcaggtttgaaatgataccgtcgatgagcagttcctggaaccactcctgtatcgcgtcaaagatcaacggggatcacctcctttccgggaggccccgtgtgccggggcctcccgtggggtctgctggcagacatcaggcggagagcaggccggacagcagggggatcagggtcaggccgatgagggcgacaccgccgccggccatgagctgcttgatgccctggcttttggaggcagggttgtcctgcccgtaaccttccaggaggttgatgccgccccacacgcacaggccgccgcccagcgcaatcaccagagtctgcaatacgtcgatagcgttagtgaaaaaatccataaatcatatttcctttcttcgttgtagaattgttattgaaggtccgttgctgtcaattcgtacatctcgaaaggctcatccggctttacgatggccggtttgcgtttcatgtaccgttccatatcaaagaggtacttcttgtcggcgtcggcggtgtatttgtaattcggatgctttgtcaggtcgtacttgtccgagaggaacgggcgcacaccccgcagcatgaagatacacttgcctccgtccatcactgccaattcgtcttgtgtcatcagctcctttcccaatttctgataggtgaggccgtgggaaacctggctgccgcggttctccgattgattgaaactgtcgatcgtttctttccccagcagctccgaaatttctttcagggtggatttctccttgcctcccaaaaacaaggtgctgtcgcagttacccacgatggtatccgccgcgtccttgtagatggtctttaactggctttggctctgcaaaataatagaagccgatatttcacggcttcggatggtggcaatcagcttgtcgaagttcgggatttgaccgatgttcgcaaactcgtccagcaagcaccgcacatggaccggcaggcgtcccccgtagaagtcgtccgccttgtcgcacagcaggttgaaaagctgggagtacatgagcgccgccacaaaattgaaggtgctgtccgtatctgacaaaatcacgaacagcgccgatttgcggtcgcccagggtgtccagctccagctcgtcctccgccatgaggtcccgcagctcctggatgtcaaagggagaaaggcgggcgccgcagctaatcagtatggattttagagttttgccagagacgaaaagtcaaggactttttcatcaaattcaaaaagaagtcacattttgcggacttcctcacggagcagacgcttgattttgtcctccatcgtctcttttgcggtctggctgaaatggacacggacgatatatgtggtcttgccgatctgctttctgacagtcgggcaagtggcggtgttggttgcggtattgttcattcaaaatcctcctgtaaatgaaaaatgcccggtgactgttcatcatcgggcggtgtcggtatgagggaacaaggcaaggcggcaacattaaggtatctataaaaaccttgccgtctttgccatgcttgccgtgttcctgttgtcagttgcggagatagcagacccatgctgtgccgtctttctcggtcacaagtctgtccccgatacggctctttgccgttctcatggtgcgtgaggaaatcccacgctcattgactgccttttccagttctgcgctcggcatacgctttccgtccgcaagcagttccagaatgagcatttgcgcctgtgcggtcttgctctcggtcttggcggtgtccgtcccggcaagaagctcgtcagcggtaatgtcataagcccctatccactcaaaacctttctcgtctcccagagaaaaggcaagggactgtccgggcggcgcaagggagcttttctcatggataagcaccctcgttgtggggctgtccttcagcttgccgataaaaagcagactgcggactgccgccgtaatgtcgatagaccctaatccccgataggtgctttgcgttcctgcggctttgttcaggtgtccgatcagcacgatagcgcacccggtagcctgtgcaatgtctcccagactgcggaagatgggacggacttcatttgcccggttcatgtccacatctgcgcccagaaacgcctgcaccgggtcaatgataaccagccttgcgttgttctcccggattgcccttgctatgcgttcatcggcaagagtcagcggcgtgtctctatcgtcaatgacaagcactcgttcaaggtctgcgtccgcttccatcagccggggcttaacggtatcgcccagaccgtcctcggcggtctgatagatgatattgaaaggctcaagtgtccccataccgggtaaaggctttcgattggtgcaagccgccgcaaggcgcatagcaaagtaggtcttgccctcgccggggttgccctgtatgatggtcagctttccaaatgggatatacggaaaccatagccaatccacgctcgtcagctccacatctgccatacggagcattgggacaggctgggcggtgggcagctctcgcagcgtgattgtctcagctatgaatttgcggctgggaatgtccccttgctgacggagaacatcgttccagtctttccttgccgggacaaggcgaatgacggcgatctcgctgggaatgtcctgcgccagtcggaagcaggcttcacttcctgtggcgtcgctgtcaaggcagaggaacacttttcgggtgtccttgcgttcagaaaggaaacggtcaagggctttgcccgaaacgccgcccagggcaagataatttcttgtctgccaatcctgcggataaaggcagatgaatgataacaggtctattggcgcttcaaagacaaagagctggttgctgttgccctcatagcggaacggataggacttgtcagacccgataatatcctgtctgaatgtgtctgccgttcctcgcacatgggcatatctcggtgtgccgtttcggtctctgccgacaaacacaacattgtgccgttttgcgtcctcgtaaatatccccggaaagaagaaaagcctcaaccagtttcgggttgagacctcggctttcgcaaagatattgaattgctctgtcggctgttctgttgtgcaagggcaagtggaacgctgtgggcggtgctgtggtggcttcggcctgtccctcgccgttttcgcctgtcaacatctggacagcttcgggaaaggacttgccgtaaaactccataacaaaatcaatgggatagccgcccttgctctggctgtggcgaaaccacttgtttccccggacggtcaggctgtcatgttctttccagcggtattcccgtccgcttttgataagcgtctctccctgtgtgcggagaaaatcttccagactgacggcgtttgcccggtcgatctgtgcttgggtgtactgcatgggcgtcctccttacttcttgaaaacagcgcatcgtctgcaaattccatgctcacgctcgtccagcgtgtaggggcagttcgcacattcctcgccgtactgtctcatgataacaggcagatagcccagctcctgcaacatatcaatctggcggtcggtgagggtggcttcaaaggcaaggcatttccgggtgtgttcgtccagctcgatcaggtcggaaagcggtctgccatcggtcaaaggttctccgctcaaaaggcgttttgccgttctgcggatggggttgtactcgttcttccagtcgtattttttcatcgtgtcatatcctcctttttctgtcgtgtttggggtcgattttggagcatttgttcctctgtacgctcgttaaatcgggcggcagtatctacacatgacttgaccttccaaagacggtgtaaatcgtctctgacggtcttaaactcgccataggtggtgttgtgcgcctgttccagctcgtcatactcttcggtcagctttttcatatccaccttgccgtccgggaattctccggtcagcttgcgtctggcggcgtagaactgtttcagttccgtttcatgctctgccttgtacttggctctgggcttctcaaacttgattttctgcaagccgtcatagacaggcttcaagctctggaaagcagcagagctgtcatagagccgcttaatcgctttcattcgagcggtctgttcgtccagcgttttcttcaagctctctgtggcagcactgtgttcgctgacacggcgttccaaatcctcaagggagtaaatgccgtttgcccggagataattgaaagtctcgttcatctcctttaggttgctgaccttgcctttctgcgaatatgccccggctctgcggctggtgtaataggcgttcagcagagaaacaaggtcgggtgcctgtggcttggcaagctccgcttttgcttcggcaatccaatcaaacaggagagtgattttcttcttgatgtcacggataacggcattggtggctttgatccagcggttgaactcgcctttctcggtgcgtatgcctttcttctccatggcccggacggttgcgccctcgtggacggtgggaagaagctccacgccctgacgctcatagctccggtggtcgatacgaacatcaatacctttttccgcaaacttggcattgcatagctccgcccatgtctgccgccagtattccagcgtttcgggactgccccagtcggtagtgggaacggcgttgaacacaaactttccgtctgcgtcccggatacggttgccgtcctcgtccagctcgtacacccggcgttgctttagcccccatttgccgttctgctcgatggggcggatggggcaaagcacatgaaaatgcgggtttggtatgccgccgtcctcccggtctggctggtgtacggcgaagtcaaccaccatgccccggctcacaaagttctccaacaaaaattgccttgcaagagcgatgttttcctcaagggaaaattcattctgcaaggcaatgtcaaagctgtatgcaagctgagcgttctttccacgctcggctttttccacggcgttccatagggtctggcggtctgcgtattcgggcggtgcatgggacggcaggagaatgtcagagcagatcacgccgcccttgcgggtgtagtcgctgtattcgccgtaatactcgctatacaatcgctccccggcacggtaggcggcagaagcaatagcggactgtcctgcgcttcgcttagtctgcgtgacgctcagatgaaatagtgccatcggctttcagctccttttctctgttcgcttggttggtgtgagtaatcgccatgtgccggacggctcgctggacttcggacagagaaaagatgtgttccatcagctctgtcatttcggtgcgtgtgagatctttgacctccggggcaaggctctcaatcgtgccgcccagattgcaaaggcggtgggtgcgcttggtgcgttcgcctttctccagatacttctttctgttctccagacgctccagcttgtgcttctcctgtgcaagctgcgtctcagctcgttccttttcggctcgaagctgatcgagggttttcggttttgtcattgtgattgacctccttttttgatttttgggataaaaaaagaccgtcaacttttcgcacattgcgaccagtcaacggtctgattttcggtatttatttttccaaacttgctggcggcgaacagcatttcatgctgtttgcggacggcaagtccacaagggatagacgcacaagcgtcgcaagggagtgtagctcccttgacggaacgaagtgacgaaacattttcggtcaagcagtttttctctgctgaccgggaatgaagctccgcaggacgcacatactcccgataggagagtatagaagtgcgccctttagttcctaaaggggtttgctccggcttaatttctcgacaaactgcaattagtcatttcagtaagtattttcctagtcctatctgaatcaaatataggacaaggatatgtgctggataaaaaacatagaagaagtattttagcttcagtttaccacgctttccgttgtatagcagaataagcaagcaggcaagaagcgtacataaaggcggttgattccccgttgtccccatgtaagccaaaaggaacagcaacacttgatagattcggtgattacggcaaatataaaatgctgatatgaataagatcccctgcataccgtagtcacaatggattccttccgcaatgccggaaaaaagcactacactgagaacttgcaggactgctgattttattctatccaccggtaggtctgatttacacgaaaatctttcaaggcataccaatgtcaataagcctaaaaacaaggtgaaaaatacattttgatacttcaagtaaaacggaaatgtatcttccattcgtgaatacgcactaaagaaacctatgtcaaatggaacttccgaaataagggcaaatgcaagcatcaacccaatatagcgttttttacttcttgtgtgttggaatccttctgccagcaaaaaacagaatagcggaaaagcaatcgtcccaatgctttgcaaatcaaaccgtatgaaataatctatctctcggaatctctcccacgacatttgcccgttatctgccatagccccccagtagtttgatagcagccattgcagcacaattttacatagatggtcaataagcattgtcagtacagcaataacctttagcgaatttcctgagagaaattgaatgcgatttattttcctatcaaggctcataaagcaacctcctaccaacttccaattctacgatttttcgcattcaaattataccataaaactcgtgaacaattctatcgcaactttggaatatatgagaaaagtccgaacagttttctgcccggactttctcgttcaatcataaatcaattccgctttcacaatctcctctgcctgtgccttgcaagcgttcatctgccgcacccattccatttggttttcggctttcagctgttcggtcacgccgttgcgcttcaccagctccggcacgatcagctccatgcggtttcgtgccgcttcttcaatctcggcgcaatgttcaaagagcttgtcggatagcaccagctcattgaacagtatcgggcggtgcatttccagatacgccttgcgaagtctgccgtagtgtccgatgggcttggtcttgcggataacaatgttcgggataagataatctccgttctgtctgtaagtgatgttcatgcaatctgcgctcctttctgcggctctctctgcggtaaactgctgacagggacgaacacgccctttgcaatatcctccgcacgaatggcggctttcttggcttcgatttctgccttttttctccccttgattttgtcctcgtatcgcttctgcgatccgctggctttccgcttcaagtagttctgatgaagcctgtctttgcgttcctcacgcttgcggatttcttctaattcctctggggtaagctccacttctccaaacgccggaggaacgaatcgcccgacaaaattgaagtaaatctcgacctcctgtgtggtctgtatactgcccttgcggtcacgctcatgcacaaggattttctcgataaactcgttgagcatggcaatggtcagcttgtcgaagttctcatatttgtcaatcagagcgataaaacggtcagcgtccttttcgtgcttctcatagctcttgacagccttttccagagcagagatttcagcggtaagctcggactgttccttttcgtattgagcgtccagagtggcgtatctgctgtcggacagcttgcctaaaatgttgtcctcatagattttgcagagcaggacttccagctcggaaactctctgctttgctgtggcaaggcgtgtgcgctgttttctgacctctgccgtctgctggctggactgcgcttcctgcaccacacggacaaactcggctcggtcatgcttggcatactcggcaatagctttgagcatttcggaaacaagggacagtaccacatcttcattgatacggtgctgtgtcgtgcagagctttccaactgggactttgctgtattgggaacaggtatattgagaaatacgcttgccgttgttggtacggtggacatacatcttgccgccgcaatcggcacaataaagcaagcctgtgaggggagctgcttcgccccagccgtccgggtagcgtctgacattcccacggattttctgcacaaggtcaaaggtctgctggtcaataatggcttcgtgcgtattctcaaaaatcgtccattcgtcctccgggacataatggcttttcttgtccttgaagtgctttcgggtcttgaaattgatggtgtgtcccagatattcacgcttttcaagaatgttgcagatggtggaagaaccccagccgtacacatctttgaaagtcttattcttgttcacgccctcgccgtgctgggcaaggtaagcggacggaatgaggactttttcttctttcagcttgctggcgatctgatacggaccgtagccctcaatcgtcatggcaaagatgcgcttgaccacatcagcggcttcggggtcaaccaaccattggtctctggcttcgttccagagatagccgtaaatgaccgtgcctgtgaggtgcttgccggacttgccttttgactggaaagtggaacggattttacggctggtatctctggcgtaatactcattcataatgttgcggaacggggtaaaatcatcgtcccctctggcactgtccacgccgtcattgatggcgataaggcgaacgccacgctgacgcaggatttccataatctgaccgactttcagatagtcacgacccatgcggctcatgtccttgatacacagatactccacattcccggcttcaacctctttcatcattgccaaaaatccgggacggtcaaagcaagtaccactaatgccatcgtccgtgaaatggacaatgtttgtaaagccctgccgtgcggcgaactcctccaacatagccttttgattggaaatggaattgctctcacgctgttggtcatcatctttgccaaagtcatcacggctcagtcgttcgtacagagcagtgattttctcgttttttctcataacttgcgctcctttcttcggttttaggttgtgtgttctaagagacttcccaaccgcttgattaagaagtcttttagagcatacaacacccgccgccatcttgaatttgcggtactgcttcacagcaaagtggtccgggtgctccttttccagcttggcgaacaggatgtccaccgggctttggaactcctcgtcgtcctcccgcgcctcactggcgttgatgaggtccagcagggtgataaagttgcgctcctccggctccgcctcgtaccagatgtacccgatgagggcggaatagtacagccgctcggccttcacccagaaatcttcactggacttttcgccctcgcctttggtgttgaggatcagggcgttcaccagcttcaaaatatccttctcgctgcggatgtacgccagagggttataccgcatggacttcttgaagttgatgaggttcaggcttttgatgcggtatcccttgcgctccagcagggctcctacctcgttcaggatggtgcctttcgggtcagtgaccacataggaggaatggcactggagcaggttgggcttgacaaagaaccttgtctttccgctgccggaaccgccaatgaccaaaatgtttttattcctggcatacttgggctccttggggcggctcgacatggtgatccgttccgtctgagtgaggaggacgttctggaagaagtccgggtctgcgtagggagcgatgtcggccggggtgccccagcgggcgctcccgtactcgatcccccggcggtatttcttcgcgttcttgcctttggagtagaccgccagccggatcagcaccgcgccggcggcgcccatgcacaggtccagcagatggaagctgggcgccaggctggcaaaggccgccgaaaagccctgcccgatgtggagcagcttctccgaggcgtccgccccaggcgccagccgtatcccctggcagagcttgtcaaagagatacacgaagatgagatacgggaggttgaggatgagctgttttttcagcttgtcggtcatcgcgccacctcccggtctttggtcttgaccttctcccgctggcggtgctgggtcttggcctgttcctgggcctgagccagccgctcccggatggtggggcgcttctcccggttcaaggtcatagcagtgaactccttgaaggccggctggagctggtccttgtccttcgccttgaagaacacatagtagtgcggcgggtcggttgtggggtcctttttcagggcatagtcgatgtcatacttcttcgccaccgccgaaaacgccttgatgttctgctccgtgatctcgatgttggtcagggaggccccatgctgtttgagctggtacagggtctgcttcccctggtgcaagctgcgctgggagggctttttctgcatctcatccagcaccttcttcacggccttttggagcaggtccgccgtcatcttgccggtctccaccgagagggagaccacgccctgggtgatttcttcctgcacgcacatcacctccgatctccgccgccgtacatatcgtggctcaccagggaagtgtagtagctgtcgatggtggccggggcgttatacaaagcggccagcaggtatttcttgatattgcggacataggtggtgttctcccgcatccggtccagcacatactcgatgtgggaactgttcagcttcaggaaccgggacttgaccacctccgccgggtagtcgtccccggcgatacggatcatctcccggttggagcacaccgtgtccaccatgagctccaccagctcgtccaggcggtcacggtcaaggcggtggttctggatgaggcagtcatactcgatgttctccaaaatcaattcccgatagctttcccgttcccgcatccggtcccgtcctttccggtccgagcccctgggggtttgggggattgattggacaggatttgatccttccgtactgagttcatctttttttgatttatcaggattgcttttatctttatttaattgcggccggttttccagacctggagtatccatatccgggttttccgtatctggatgttccgtatccggctcatcctcacacggcccgtccggctccgggggatggggcgtttcgtagatgacatactccacgtccacgatcttgcccttgctgtcccggaggcggttgcggacgatgtagccggctcgctccagctccttcagggcagagccgatgctgtccgtaccctccttgcagatcttcgcaaggcccctggtggtgtagttccagtcctcaggcagggacagcatcatggagagcagccccttggatttcaacgacaggtccgtatcccgcagatggtgattggacatcaccgtgtaatcgcgggttttctcaatgcggaataccgccatgttggatacctccttccttcggttttgaaaaagtgttcgttttggcaggtttacgcccctgtaccgccgcccggcttcccatgggggaaaggatatgggcggcctcgtttgcgccgtccacaggcgaaaaaacaagggatttcccaccctaaaacgcacactaaatttggggatagaaaaagggcgactgttaaaaaacagccgcccaaaagggggtctaatacaagttatttgctatccggcaagcccggaaaccgttgatattacgggattttttgaaaagttctgtatcgccattcgtaccaaaaggcaagtccatatggacttgccttttttgttgtatctaccttcattgtaaaccggagattgatgcatatgtcgttttctgattttacaaccgcgctcttgttgcttgccgcgttctcattttttttcaaacagctgcattaccgctcacccgagaaattggaagcagaaggccaaaagagaatcgccaaaatgctttctaaaacatcttttatgggatatggaagccgcctgctgcaaaacctgtatgtgccatcaacggccggaggttcctctgtcacttccgaaattgatttgctttaccttaccccaaaaggcctgatcgttattgaaagcaaaaacttttcgggttacattttcggaaacgacgcttccccgcaatggaccgtttccctgtctgccgggagatgccggcgcggaaaagggggttcccaaaaataccacttctataaccctatttggcagaacagcaaccacatcaagaatctgatccgctttttgggtgatgatgtcccctgcatctccgtcattgtgttttctgatcgctgtgccttgatggatatcaactggaatgcaccgggcacctatatctgtcagttacatgatctgactcggctgatgcgcgatatatcaaacgcttatcccaatgtcctttcagccgagcaaatagacacaatttatgcccagctcttccccttagcctgcaccgatgctgtccagaaggagtggcatacacagcaaatcgagtatcgttttcacgaatcacccgtctgtccggtctgtggtgctcctttggttttgcgcacagtaaaacacgggcctaacaccggcctgtccttctatggctgttccaattatccaaactgccggtatacacgagatttgtgattgcgccccagttttccagcacatttgcaaaacaagcacaaattcacatttaagatgggaaatcgaatccatccgccacaatctccagtcaggcaaatcattgatcagatcctaaaaacataattctacaaaagcatcgtattgctcatatcctccacagaggcggacattccaagtccagggatagcatacagaacgaaagcgctaaaccgatacggtttcagcgcttttatttttacgccaagaaccccgcaaatcaaatcgcaaaaagccagctcaaagtactcttaattataatatttattgtaatatcattttagatattgacaaaccgctttgttcgccgtatactggttttacaaattacgaaaggcggcagaatcatgaatcaaaattttgatgcttcttactttgatggtcttctgaaaagcagcaaagcaaacaaaaagcaagttgctgtttacctggatgatgcaaccgtagaacggttggatatgattgccaagctcttttccgcggccagtgattccaaaagcttttcgaggaacagcctgattgaaattgccatagaaaagtttttgtctgaatccgaaacttatctccgtgaagaactgggagcagacgtccacgcactgattgaggaagaaaagtccaaaaaattcgataccgctatcctttcctccacagacaaaggttttgtaaacaccttcctgggtcaggccgaagcgccctgctggtatccttgcagaatcagcgacgcccgggagcagggattgaaattcattgccatctaccgtagtcagcctatttcggcaatcacccattacgccaaaatcaaagaattcaagtacgatcccgaacgcaactgcaaagtctgctattttgacggcgatcccattaaattgcccaacaaaatcactcttggcagcaaggacgcctgctatttcatcggcacaaaatatacatccctcaaaagccttttgaacgccacaaaggccgacgagctgacctttgggtaagccagcattcgcggctctgcaacttccccggctcgcaagatcgtcttgtcggccggggctttttatatatcatttttaccgccatacagtcttttgcggccatacgacctcaatacgaccaattcaacgcggcaaaaacaaaatgcagcatgataatacataaaaaaccgcccaaccatgggaaaccccaatgattaagcggtctttcttatggagctggcaacaggaatcgaacccgcaacctgctgattacaaatcagctgctctgccagttgagctatgccagcggaacttgtttagtttatcataacggcgtgattttgtcaatgcgaaagcatcatccgccactgtttgcgcatgagcgggagcagatgtcctcctccctccccggccctttgactcagcaaaacaaaaagccgtccgtgcacaggacacggacggctttttcacgaggctgttgcctgtcggcgagattagtcgctgacgtacggcatcagagccatatgacgggcgcgcttgatggcaaccgtcagctcacgctgatggaaggcgcaggtgccggtcacacggcggggaatgatcttggcgcgctcgctcacgtacttgcgcaggcggggcagatctttgtaatcgatatgatcgatgcggtcaacgcagaagctgcaaacctttttgcggccgcgatgcatggggcgagacggacgctcgcttctctccatagccatgtcagttacctccttgtcagagtatgaaatcgaaatcagaagggcagatctccttcgtcctcaatgacggcaaaatcgtcattggagccggccgagtagctcggagccgcaggctgtgcggcgggacgggagtaatcggccatcggggccggagcaggctgacctactccgacagagttcgaggatttcgggccggcaaagttgatattgttggccacgatctcgacagcagtgcggttgttaccgttcttatcctgataggtgcgggtctgcaggcgaccgtcaacgacgatcagcgaacccttctggaaataacggcagacaaactctgcgctgcgatcccacgcaacgacgtccaggaaatccgcctggctctggccattggcatccttgcgcccacggtcacaagcaacgcggaaagacgcgacgtttttgcccgtcgtcgtctgacgcagctgggggtccgcaacaaggcggcccatgatcgcaacaacattcagcatgatgtcttacctctcttactcttcctcagcaatgatgatgctgcggagaacaccctcggtgatcttgtagacacgatccagctccgccgggaaatcggggttgctggtgaacttgatcacggtgtaaacgccctcggtctggtcgttgatggggtaagccagacgctttttgccccactcgtcgacagaatcgatcgtaccattcgcctcgatcagggacttgaacttgccaaccagagcggcggaagcctcctcgtccagcgcggcgttggtaaccagcatggtttcgtacttagccatttctgtgcacctccttttggacataaggcccttttacaagggcaaggatacccgaaaaatgctttccggggttgtgtcgtctcgacacagcaatttattataccaagcgtgttccctcttgtcaaggcatgtccgcggtattttttgcgttgtttcgcacacgacggcagagttgcaccccgccgccgttgccgggcaacgggatttgctcctcctcccgcagcagcaccgtgcagccgtactccggcatcccggttctgcgcccacacaggagggccgccctccaaaaaacggagcgcggcccttttgtgattaacaggatacggttacgccaggatgggcttgagagcttcggccagcttgtctttctgggcctgagcctcggccaggtccttgcccagcgtagtgaagtaggtcttgatcttgggctcggtaccggagggacgcaccacaacggtagcaccgctctccaggctgtagatcaggacattggcggcgggcagccccgtctcttccggcttcttgtagtcggtgaccttgacgaccttatcgccggcgaagtccttgggcgggttggcgcgcaggtcggccatgatgccggccatcttgtccataccggacaggccggggaactcaaagctgtcaaccttattgagataacggccgtactcggcatagatgcggtccagttcttccttgatggagctgccctgggcgcggtaatatgccgccatctcgcagatcagcatgctgccgatgatggcatccttgtcacggacgtagggacctgccaggtagccgtagctctcctcaaagccgaagatgaagcggtcgacctgaccgtcggcttccagcttggcgatctgatcgccgatccacttgaagccggtgagcacgttgcggcactcaacaccgtaatgggcagccaccttgtcggccagcggagtggagacgatggacttgcacataacgggatctttgggcatggtcccctgctcaatgcggcctgcgcagatgtaatccagcagcaggacgccgacctcgttgccggagagcagctcatagctgccgtccttgcacttgacggcgatgcccacacggtccgcgtcggggtcggtggcgagcatcaggtcagctccatccttctgtgccagttccagaccaaggcgcagagcctcgaaaatttcggggttgggataggggcaggtggggaagttgccgtccgggtctttctgctcgggaacaatggtaacgtcggtgatgccaatgtctgccaggacatgggtgaccgggaccaggccgctgccgttgagcgggctgtacaccagcttgaggccggcggtcttgcagatgccgggacggatggaacgggcttcaatggcctcgtacagagcgttgatgcagtcgtcgcccacatactcgatcaggcccttctccatgccctcggcaaagggcatggtcttggcacctgtgaggatgtcggtcttctggatctcggcatagacgatgtcggcggcttcatcggtcatctggcagccgtcggggccgtaagccttataaccgttgtatttggcagggttgtggctggccgtgaccatgatgccagcgttgcagtgatagtagcgggtggcaaaggaaagcgcaggcacaggcatcagatgctcatagatgcggacatggatgccgttggccgccaggacttccgccgcggccttggcgaacacatcgctcttgatgcggctgtcgtagctgatggcgacggtctgggtgccgccctgggtcttgacccagttggcaaggccctgggtcgcctggcgcacaacataaacgttcatacggttggtgcccgcgccgatcacgccgcgcagacccgccgtgccgaatttcaaagagatcgcaaaacgatcctgaatagcggcgtcatcctcacggattccttccagttccggtttgaggtccgcatcatccaggtcggctgcgagccatctctcatacatttctttatacatatgtaaccaccttcgctttccaagttgctccatttttgggcaatatcactgttacaaaataaatataccaatccccggctttattgtcaatgaaaacgccccctttcgacccgttttttgccccttgaccttgtttgtaccgccttcgcgcggtatactgagaataagattgcggctttcccggcaggctttccgccgggagccgcccacacagggaggtctgcgcgtgtttgccagagtgatgagttttggtgtaagcggaatggacggctatccggtcggagtggaagtggatacctccggcgggctgcctcagtttgccattgtgggactgcctgactccgccgtcaaggaaagctccgagcgggtgcgcagtgccgtaaaaaacctgaaatatccctggcccgccagccgcattacggtaaacctctcccctgccgacgtgcggaaaaccggccccgtctacgacttgcccatcctcatcggcattcttgccgccgagggcacgctgccctcccctgccgctcatcaggcatttatgggtgagctgagtctggacggaagcctgcgccccgtgtccggggtcctgcccatgtcccttgccgcggcacgctgcggcatccgggagctgttcgttcccgccgaaaacgccgccgaagctgctgccgccgacggcatcaccgtctatcctgcccgcagcgcccgggaggtggccgcccacctggccggggatgccctgctcgctccggccgagcaccaggcatacagcgaggaccttgtctggaacggccccgattttgccgatgtgcgcgggcaggaggaagcccgccgggcgctggaagttgccgccgcaggcggacacaacatcctgctgatcggcccgccgggcaccggaaagagcatgctggccaagcggctgccgggtattctgccgccgctgagttatcaggaatccctggagacaacggcggtgtattcggtggcagggctttccccggaaggcggactgatgcatcagcggcctttccgcagcccgcaccacaccaccagcgcctcggctatatccggcggcggcagcgtcccccgccccggcgaggtcagcctggcccacaacggcgtgctgtttttggacgagctgcccgagttttcccgcgaaacactggaagccctgcgccagcccttggaggaccgggtggtcaccatcagccgggtgcacggcagttccgttttcccctgccgctttatgctggcggctgccatgaacccctgcaaatgcgggtatctcggccatccgacccgggcctgcacctgtacccccgccatggtggaacagtaccggcaccgcatttcagggccgctgctggaccggatcgatctgcacatcggcgtgcagccggtggaatacagcgcccttgcggcggagcacggcggcgagtccagcgccgacatccgcgcccgcgtcatggaggcccgcgccctccagcgcaagcgctacgaggggaccggcgtccgctgcaatgccgacctgcccggcgggatgctgcgccgctactgccggatggataccggcgccgaacggctgttgcgcggtgcctttgagcgcatgggatacagcgcccgcgcctatgaccgcatcctgcgcgtggcaaggaccattgccgacctggaccacagtgagatcattaccgccgtgcatctgtcggaggtgttacagtaccgcagcctggatcgaagcaatcgcccgtgacccgggcaggatgcacagcggccctctgtgcccgatacccccggccgcccgttttcccttctataacaaacaaaagagccgccgccccgcagactactctgcaggacggcggtctttttggtttgtggatcgcatcaaagctccgattcgtcgatcacctggttgaccgcccggacaaacgcccggtattcctcggtcatttcctgaaggtgctgtcggcccaggtccgtcgcctcaaaataaactctggcgcgcatccccttttccggtgtctccgtcacggtgacgaagccctgccgtttcaggcgctgcagcggtgtgttgagtttgtcatacaccaccacctcgtccgtaagggccgccaggtactgaatgatctcatgtccatacatggcgcggcggctcaaaagcgtcagaacaagcatatcaacgacgtcccgctgcaggaccccctgcagtgctcccgggctccacacccgcggcttgggtgttctcggcatagatattctccccctttgcaaaagcctgcggcatttgcatccaattcctgttatggataattatagcagaaaccgttttattcgacaagaactcccgcatcaaagtgcttctgcacagcacaaactgcacattgtacagtaaaaaacacagcaaaatagccggtatgcaccgcgggtcctgtccccggcataccggcattgttcaaagaaaatcagcggcgaagcatatatcccacctgaaaaaccgtcacgatctcatccttaagatccagtttgcggcgcagatgggtaatgtgcatatccgtggtgcggctgcggaccgggaccgaagttccccagatccggttgagcatttcctcccgcgtgacggggcggccgatcctgcccagcaggcagccgaacagggcgcactccgccggggtgagctgcagttcatccttttcgccttccccgcggctcaccaggccggtctgcaagtcgacggtcagtccccgataccggatcttcccgcggggaattctgggttttcgttgcttggtctgctgattgcaaatgttcgacatcgtattcgacctccttttcccggatattccgggccttttcataccgctgtttccagcggtgcccctcgccattcatagtttgcgatcaaattctgggccagcgcccagatcgctcccagtgccagaagcaaaatcagtatcaccgcccaggcaagagaccagggcgtgccgtcagggccgccatacccttgagtggaaagcagcgccgcaccgtggaacagcggataaacgcccagccactcgatgccgccctccatcccggacagggaaagcagcggcggcaggcagtacaccacggcgctgacaaaaacggccggcagaggatttccgaaccggtcccccagccacagcgtgatcccggccatgagcaggcaggcagccacgcggcacagcacccaaaagagcagcacgtcgcccagcgtaacggctttgggcagcgtttcaaattccgaaatgctgaacgccggcgcgccgggggcaggcaggccgtaatcccgcaggatctgccagacatgcggcaggcaggtccccagggcaatgaccaccgccagaacggcactttgcgccagcttggcccgcaccgtatacttgcgccccagtggcgttgtacacaaaatctccgccatgccgcccctgcgctccatagcaaagagtccggcaaagcatacggcgcagagcatccccgcgtacagggcgtcctgcacgtctgccgtgccgttcagcccgaacagcttgcgccagccggtctcgtacaccagccacgccccggggtgttccttgagatacccgttgatattgctgccgatgatccgggtataaacgttgtacttttgctgaagagaaagatacgcatagccagcttcctggggaaggttccccgcctggatctgcttttgggtatccagcatgggggcgaactcttccccctgcttcgcgagccagtcggcgctctgctgcgtgaaggggccggagatcgctttcatgtaaccggcgtagtagatctcatcggcatccacatagctttgggacgtgacgccctgatacacaccgaatatcaggaacgctgcggcaaagattcccgcaccgcagctcaccagcaatttccgcccttcttctataaagacgacggtcgggcgcgttttgttgcaaattcccaaagaaaaatttattttttttgccggcaggagctgcgcacggcaaaacaccaggcaaaaaccaatgccgaaagccgccccgtacaccgcagcggcaagccattccaccagcggcagtcccaccggagatccgaaccaatacagattgcggtagttgcccagcagttcattggtttgcagcaggctggcaaggtttgcgtatttgattacattcaggcgggaggtggccgggatgactgcgcgcacggcgtacattcccagcggtaccgccaaagccgctgcccagcccgcggccgcctgccgggcacacagagccgccagcatgacccacagccccatgacaaaagcgcctgcccattttgccagcagaaagcggaacagataccgccccaccgtgatctgcatggtggagcgcatgagtgcaggaacgctctggatgctgcggtccagcggtccgatgccaaaggtcgccccgcagtacagcagattgacgccgtacagcaccgccagcgcggccagaaggctgaccgcaaaagccgccagtttggcaagggcggtatgcagacgcccgccgggcagactacggaccagccccagcaatccgctgtcccgttcctgccgcaccaggatcagggccagaaccagcatggacgccagcagcaggacatcggtaaaggcataggaaatggccgtgtaaagacctttctggggatagtagcgaatctcggtatcctccatgcccgcgtaaacctgcgccgttcgctcgatgtttttcagatcatagccggtggcatcgttctgaaaaatggagatccccgccagctgccccgcccgggtctgcacgctctgcaaaaatcccggataggcagcgacctcgtcatactcgccgcaaagctcataaaacagacggtagtcggtattcagatcgtccgtatacagggagtagctcttgtcccggtacatctgctcaaattcatcaaacaggtccgcattttgttcccggtaataactttggttcgcccccatggccatctgacggtaatagttgtcgattttgagcaggctttcggcctgggtcagctgcgtgtgaagaaattgacctgcttcctcctgcgtcatttcctccagttccgcccccactgcacggtaggcggatgccggcagctggttcgcggagggtcgggtccccatccacagcagcaacaggtttgccgccgccagaatggccagcagcatgggaaagacccgtccgccccagactttacgcagttccgccgcaaagatgctcatgccgtccccctccttttctctcatgccgggccatgccgcctgccatcatgggtaatgcgctgcgcacaggtttgccgttcagcggccgtcatcctcgccaaacacggcgaggtaaacatcttccaggcccttgccgggggcatagcgttccaccagttcccccaccggcgcggcgtccacgattttccccgcccgcagcaggatgacctggctggctacgctctccacgtcggacaccacatgggtcgccagcagaatgatgcggtcctgcgccatgcccgcaagcagagtacgcaggcggacccgctcccgggggtcaaggcccgcagtgggttcgtccagaatcagcaggcgggggtcccccagcagggccgccgccaaaagcaggcgctgcttcatgccgccggagtaggcagccaggcgcttgtccagttcccgggagagattcaccgcttcggacactcttgcgacctcgtccgccactctgccgcgggggatctctttgagggccgccatataggccaggaaccgccgtcccgtatagctgtcgtacaagccctgctgctggggcatataccccagaatccgccggaaacgaatgccccgcgccggatgtccgcaccacagcacttctcccgaatccggtgcaaggccgccggtgatgatccggagcagcgtgctcttgcctgcaccgttaggccctaaaaggccgtacagccccggccccagagtaatacttaccccggccagcgcctttttgaccgccggtcttttctgtctggccgcccggctcaacgggaacccggccggcagcggatagcttttgcgcaggtcggacagtgtaaagatcatcggctggtttgggattgctggcatgggaccgccccttttccggatagattcacgattctcatgatagccgggcgatgtttcaaaaaagtatcagaggccgcccgtgaaggggcagccttccggaatggggtcgtggcggaatatggcgggcagcgttttctgcacgcaaaaagccaccggagcgccgaacattcgggccccggtggcttggatggttatagatgttgctccgctgcggcggaggcttcttcccacaggcgcgttttaccccgcaggaggaagctgctcagtggataaatgcgtcgtggatggcagtgacggcacggtcggcgtccgccttgtcgatgatgacgctgatcttgatctcgctggtggagatcatatggatgttgatgccctggttgaacagagcctcgaacatggtggacgccacgccggaatggctctgcatgcctgcaccgacgatggagaccttggcgtaatcggtgctgacctggacttcgccgccgccgaaacggttcttgttctcgttcaggacactgacagcagtctgggcctcggtcagaggcacggtgaagatgaggtccttattgttctcgcggccggagctctgcagaatgatgtcaacgttgatgttgcgctgcgccagcatgctaaagaccttgaaggacatgccgggcacatccggcacctccatgatggaaattacggctacgttttcgtccttggcgacacccttaatcagcataccttccactttcgtttcctccttcacaatagtaccgggaacggggttcaggctggaaatgacctccagctcgacgccgtattttttggcaagttccacgctgcggttgttcagaacctgtgcgcccaggctagcaagttccagcatctcgtcaaaggtgatctccttcaatttggtggctttgggcagcttgcgcgggtcggcggtatagacgccctccacgtcggtgaagatctggcagcggtccgcatgcagtgcggcggccagtgccacggcggaagtatcgctgccgccgcggcccagcgtggtaatgtcatccgaacggttgaggccctggaagcctgctacaacgaccacacggttgcgggccagttcgctttccagacgttcggcgttgatgcgcttgatgcgtgccttggtataggcccggtcagtggcaaagcctgcctgccagcccgtcaggctgatggcggaaatgcccagctcctgcaacgccatggtcagcagcgcaatggagatctgctcaccggtggagagcagcatatccatctcgcggtcggacggattgctggagatctcagccgccttggcgatcaggtcatcggtggtgtcgccctgtgccgagaccacaacgaccacgtcgttgcccgccttgcgggtgttggcgacgatacgcgccacgttaaagatccggctgcggtccttgaccgaggtaccaccaaatttttgtacgatcagtcccatatcgtgaatttcctccccattcatgtgccgcggcatgcccgaaggccgggccccggcccgattctatttctacggtcaccgtacggtcgcgccgacgttgtcggccaaaagccggtgaacggtgaaagccttgagcttttcatcggcagacagcgctgcggctgcccgctcaaaaaattccttgtcgctgcgccggaccaccgccatgatggtcggccctgcacccgaaatatacacggccaaagcgcccatgtcaagagccaattcaaaaacctcgtctccgccggggatcaaaggcaggcggtagctctggtgcagggcatctttagtagccacacccagcaggtcatagtcgccgtcgcagaaggctgcggtggccagtgccgcgcgggacaggttataaaccgcgtccttatgagagaccatctggggcagcgccgcacgggccttggcggtcagcaagccaaagttgggaacgaaagccgcaaaggccagttcctcatcaatatgctttttgacggtgtagacctggccctcatcgtagacgctggtgacaaagccgcccagcatggccggagccacgttgtcggggtggccttcaatggcggtggccagcgtcagcatctggcgctgggtcagccggccgcccagcagagcgttggcgcccaggatgcccgccacaatgcaggcggagctggaccccaggccgcgggccatgggaatgtcgttgcgctgggtgatgcgcaggccgggcagcggaatgcccagctggtcatacaccgcccgggcgctgcggaaaaccaggttattggcccctgcgggaacgtgggtgccgtccaccgaagagatgtaaatgcggtcggcttcctcaaaggtaaagacattgtgcatcgagagtgccagacccagagagtcaaaccccgcgccgacgttggcgctggtggcaggtacggtgaccgtaatcattgtatgcagttcctccctttgccgttacgccggcagctgtttgagggccagaagcagttcgcagccgcgggacttcatttccgcagccagggccttgacctgtgccgcggtggcgtgttccacgcggcagacggtctcgccgttttccgagcggaccggctccatgggaagcgagaacccgtaggctcccccgcgcacacgcaggcaccaggcatactcggtggcatcctcgaacatatggtcgagcttctgggcgggctgccagaacaggctgttatgcaccgccgagccttccttgagggcatcgatcacgtcggcgaccacagcgctggcggtgggcagcttgcccgcgcccttgccgtagaacaccacgtcgcccagcatatcgcctttcaccaggatggcattgaacacgtcgtccacgccggcaagctggttattgtccggcaccagcatgggttccacaccggcgcacatgctgccgtcggcaccttcccggtaccaggcgatcagcttgatgacacattccagggattccgccgccttgacatccagggcggtcagctcccggatgccccgggtggggatgttgtccgggtaaacatggtggccgcaggccaggcttgccagaatggcaatcttgcggcaggcatcgcgtccgtccacgtcgtcgccggggtccttggtctcggcatagcccagcttctgggccaggcggagggcctcgtcaaagctcatgccttcccgcttcatcttggtcagcatgaagttggtggtgccgttaacaatgccttcgatctggctgatatggttggcggccaggcactgatgcatgggagtgatgatgggagtaccgccgcccacgctggcttcaaacaggaacgctgcgccgtgttcccttgccagggccagcagctcggcgccataggtggctaccatctctttgttgctggtacagacgctacggccgctttccaggcagcggcggacatacggatatgcgaacttggtgccgccgatggtctcgaccacggcacggacttccgggtcggccaggatgatgtcaaggtccttgacgaacagcgccgcatccggactgtcggaaaagtcccgcacatccagaatgtatttgacctccacgggttcccccgcacgccgggcaatggccgccgcgtttttgcggcagacttccagcacgccgctgccgacggtgccgaaccccatgatcgcgattttagccatgtgtaacctctcccctcaaattaccggcgcggcgtcaggtgccgcggtgaacttcgaccacgttgggctgacgcgaaaggtgcatcagcatgttttcgacgctcatctgcatcataccggtacgcaccgtcacctctacctgggcggcgccgttctccggccgggactgggtgatcgtcacgatggacgctcccgccgccgaaatgcccgaaagcaggctctgcagcgcaccggtcttgtccagaagcgttgcgatcacggtgatggtctcgcggccggtctcggcatcaaagacacagtccttatacttataaaacgcactgcgcgagatgcctgcccgccgtgccgccgccgagatgttggtcacttcccccgctgccaacagctgcttggcttccagcactttgagaaaaacgtcaggcaaaacagacgtgtcaaccaaaaggaaacgccgttcgctcatattgtccctccctcaggtacatttgtttctgaaacaaggataatcataccacgtgtgtacgcgccgcgcaagcagaaaagtcttgtttggaggacagcatcctctttttcggcgttcaacacagctttcaacaagttttgattctcttttttgtgccaatcccccaccattttcccatgctaatatagcatggcgcaggcgcacctgtccgtcgtaaaaggacacccgtagtttcccgcgcaaagttcaggcaaaattttacggtaaaccgcacgcagccgtactgccgcacgatttaccgtaaaatggatgttatcctgttttgcagctgtcaaaggcagccgcggcggaggagtgcccgcccgtcattccaggtccggtcaggctgccggatcggtgacgacggcgttggggtccacctcttcggtgtaatcctcggggaggttgtcctcggtataataaccggtcaggccgccacccgagatgatggagccggtggtgggatcaaactgcttggtcaccacatcgtccgccatggggaagtccttgtattccttgtcggccagaacttcctccatcagagctttccagagctcctgcgtcggtgtaccattcttgccgcccaattcatacatattggccggctcgtcaaagccccaccagaccgccatggagtagtacggcgtcaggcccgcgaaggtgtaatcacggaagtcggaagtcgtaccggtcttggccgctgccggaatattgttttcggtgtccggggtcatgccgcgggcagtaccggtcttgaggacgttctgcagcatccggttcatgatggtcgccgtggacggcttgatggcctgggtggtagaaatgcgcttggagttgtcgaggtagagattatcctgataatcgtagacctcggtgaaatagtgcggcgtggtgtaggtgccgtcgtagaagatggtgtaggccgcagccagctggaccgtggtcagaccataggactgagcgcccagaaccagaggtgcgtaatccatgtccttctccgggtccagataggtgcactggagggtgtcatgagcaaagttgaacatcatctcggtgccgaccatctgaccgacacgcactgcgacagtgttgagggactgctgcagtgcatcataggtcaggaccgtcgcaccgtcgccgcccgaaccgccgtagttttccggccaggagcgccagacgtcatcccgggccagagtgctggccgcaaagggatccaggtaagaatactgggtcttgaggaccttcttgtccgcagcggtatagatgcccaggtcgatctggcgggacgagtaggtcgtcaggccgttgtcgatggcaaggcagtatgccgcgatgggtttcatggtagaaccggtctggtgcggctcggtggcgcggttaaagaccaggtcatacttcttctcgcccagtccgccgaccagcgcgaccacctggccgtcgtaatcgacgacagccgcagccgcctgggtacggacacgctcgtagaagatcagcgtattggtctcctcgtccaccgtggtcttgaaggtggtgttctcgtcatccgtatagaccgggatggactcctcaccgaacacggccaccatatcgccgtcggaattgggctgcaaaggcaggccgttctcgtcataggtgatctcgctgtccgcggggatgctcgtctccacttcctcgttatgccacaatgccgggaagaactcgtcgttctcgttcagcatgaggttttccagagaggactggacgtcggggtccaccgtggagtagacgcgcagaccgccgttgagcacctcgctctgggcttcggacttggtcatgttgtaggtctccatgatggcctcgaccaggtcgttatacagagcgtcggtgaagtaggagttgttggagctgaccgtcgcggtctcggtggaggaggaatcctccaccagcgtgatggactccgcacaggcggaatcgtactcttcctgggtgatatagccctgatcgagcatctcccacaggacatggttgcggcgggcaagcaggttttcggggttggtgaaggggttgtagctggtggggttcttggtgatggatgccagcaccgcgcactcgctcagcgacagctcggaaaccgttttgccgaagtaggtctgggcgcccacttccatgccgtagatctggccggtcagggggatggtgttcagataggcttccagaatggtcgccttactgtaacggttgcacagaccgatggcgcggaagatctcacggaccttacgcaggtaaccgccgatgccttcaacgtcatcatccttggtcaggttcttgaccagctgctgttccagggtggaagcgccggtggtctgaccgtaaatggcgttgccggtgaactcgttgagggcggcgccgatggtacgcttgatgttgatgccgggctcattcataaagtccttgtcctcaacagcaatgaccgcctgctgcagatactccggcatctcatccagagacttccagatacggttgtcacttccggagaaggtggcatactcgacccactcgttggtatcccggtcaagggcatacacaatggtcgtctgcttcagtttctggttgtcgaggtcaagctcggtgtcgttggcggtaacttcgacaatatacattgccagaaagacgcccgcgacgctgcaagccatgatgccgacgcagaacaggcagaccagcgtccgccagatatacccccaaacgctgtggcggcgtttgcggggtttctttttcttcttaccgcctgcggcggggttggcggcattctgtgcgggatccgacgcattcttggcgccatcgaccgaaatatgccgttcttttttggggtctatggggaccgcctcctttgcgggaaactgttcaacaatctgacagggtaccccctgcccggccaaaaatcacacagctggcgaggataccataaactgaattataacacaaagtattgccaaaagtataggcgtgaaataaaaattcacaacaaaaaggggttaccggaagagctgcgcgggaatactgtttgcagcaacgttatttttgccggcgcatggcgcgcggcggaaaggggcgcatgacacatgcaaaaagaacacagacgcggatgggtgctgtacctttccctgttgggagcactggcgctactgtgcgtggtggccggggctttgtggtttgccctgggcagccgcccgcagccgcagcagaacaccgggtatctgctcaaagacaacggcggacaccttgccctgtacaccgccgacggcacggggcctttggcggaatatgacatctacacgcggcttttgcccgaaaatgacattcttgccttacaggaaggggtcgccgttgccaacgaagcggagctgcagcagcggctggaggattacggcctgtaaagtctttttgcctgccgcctggcccaaatacggtcagtcagcgggaaggttgggccggtcctggtcgccgtcggccttgaaaatgacaaagccttccggtttgttggtgaagtagtaatattcggtgttttcccgcagaggcggcgtgagatagttgggaatgactgtgccgtcgccgggcctgcgctcgcagaagcccgcggcgcgccagatctcggcagggatgccggcgttatagcagtccatatactccgccccggcagcacgcaggatggcatccagcgcccgacccagggtgggcaggacctcgtcgggaccgatatagtccaccaggcggatcaccggcacacagccggtctcttccgccgtgaccagacgggtcacaacgtaagccagcggacgtccggcgtccatggctgcccagacatgatagtggaaatgggggtagtggaaataccgccgccgcagataccacacatccttttgcggggtatgcccggaagcaggcacccccagagggaccagatccgccgccgtgcgcacgggaaccagtatcctgccgttttgtaccggcaggatatttttttcggtaaactgcgccagctgataggacggcagattggccaggcggtaataatggttcatgcgctcggccttccagccaaggaagcggtagagggagcaggtggccgcccggatattattgcaggccaggacccgtgcatgggtcagctcgggcagagcgttcatcagctcaaggcccacgccgttgtgccccttttccgccacccagatggagacccagacatcgggctccggctcggtgttggccaggatataccccgccgcgctcagatagcggccgttctcctccgccacggcgaactgcggcactccgcctcgccccacataataatggcggtagaaatccggccggttgatgagcggcaggcgcatatcaaaatggctgttgatgaaatcccggatggcgtcgtcctcccccaggcgggcaaggcggtatactacatcagacaatggcggaacctccggtaacaggcagcgtcacgccggtgataaagcgggcttcctccgacagcaggaacgccatggcaggcaccacatccgcaggagtggcgttgcggcccatggggttgtcagcggcagcagcctgaacaatcagatcgggggtatccttgaggaagttggtctccatcatgctgggcgcaacacagttgaccgtgacgccctggtgggcgtactccaccgccaggctcttgaccagcccgccgatggcacttttggccatgacgtaggccgccgtattcttgggcgggcagccgatggtgtagctggtctggatgaacagtacccggccgaaaccggcttttgccatcttgggcacaaagacccggcagatcttgaccgcgctgtggacctggatctccatatcccgggcaaagcgttcctcgtcaaagttcttgaagcgggtattgaccaccggcagcgcaggcaggtggacaaagtgggtgggcgtaggcgccgtctgttccagcaggcggacgaatgcgtccaccttgtacacatccgacaggtccacgtcaaaaggacgcacctggccggggtatttctggcacagaggtgctagcttttccacgtcgccgcagccctgggccagcaccagcgtgtccgagggggcgccgtccagcagacgggcaatgagcgcggtacccacatcgctggtggcaccggtgatcagataggtgtaagccataaaatggtcctccttatggcgcggctgtccgggtggcgccgcgcgtcgttggaaaggttcccctcccccgcaggctgacctgcccgggaggcaagggaaacgctgtgcaggcaggatttggcttcctgcacgacactgtgattcaacaggtcccctgcccgctccgggcaagggtggatacccatattttgcgcggtttcgtcacgaacaaaactgcaaaatactggtggcagggacgggcagtttctgcgcagtcccatgagtgagcaacgccgtaaagcggcagctgcaaggcggcatctgccgcggtatcgggttttgcgtcccgaaaaaggagcgtttccgttgcctgccctgcatcggccactccacagcggttttgcgatgcggagcatttttttcggagccttcacattctaatgttgcccgcgctttccgccggagctttgcgccactggtatccgcgctttggttccggcagttacttggcaagcccggcacggatcacgccgcgcgtgacctttttgccgtcctgattggtgatggtagccttgatctcggcttcgctgactgcctcgctgacatgggtcaccgtgccggagatggtcagggtatcccccacaaacaccggccgggcaaacttgcagtccacgccgtgcagcaggcagtgttccccggggagatacacccccgccagggtggagaaaaagctggcgcccagcatgccgtagaccacacggcccggatagccccggcccttggcgtagtcctcgtccacatggatgggcgagcaatcaccggtcaggctgagaaatgcgtccatcatctcctgggtgacggtgacggtaaaggattcggtcaggccgggctgcatttcggccagcgtataatggttcatgggacggcctccttacaggtctgttccggatacggcaaagggcgggcgcacggcccgcccaaaggcttttcagattgcgtcaaatgagactcagcccaccatgcgcttgaccagatccagcaggtcgcccacgtctttcaggccgcggacatccgccagcttgaacttgatggagaacttcttctcgatggcagtcagcaggttgatctgctccaggctgtcccagtcctcgatgtcatcggcgcaggtatcgcgggtgatcaccagggtgtcgtcgtcaaaattatcgcggaaaatttcctgaaccgcgtccagaattgcttgctcagtcattggtcaactctccttaacctgttttgatccgcccgttgtctgcacaagggcggcattgtaccgtatataagtttaccacaaaccgcccgtccaggcaaggcaggttcattcctcgtcgggcttttccccggcgggctgcactccgctgcgttccatgcaggcccgcaggtccagaaaatcctgcagggtcatctgttccggccgcagacggacatccagcccggtctgctccatggcctgcaggacggcggatttctccaccttcaggcccgatgcaatggcgttggccgccgttttgcgccgctgggaaaacgccgcccgcaccaggcggaaaaggcctttctccgcctcgggggaaagatcgcctttgggagtcttgcggacatccaggcggatgaccgcactggtcaccttgggcgccgggtaaaaactgccgggctggacggtgaacagctgatgggcctgggcatagtaatccaccgcatagctgatggcgccggcctcccgggtgcccgggggcgcgcaaagccgctgggccgcctcccgctggaccatgacggtgatgttttccaccggcaggcgttcctccagcaggcgcataaggatggggctggtgatgtaatagggcaggttggcgcagactgccacagggcggtcgccgaactcctcccggatcagggccttcaggtctaccttgaggacatccccttccacaatgcggatgttgtcatagggggcaagggtctctgccagcagcggcggcaggcggcggtcgatctccaccgagaccacccgtgccgcccgctgggcaagctgctcggtcaggacgccgataccggggccgatctccagcacgccccattcgggaccgatgcctgccgactccgcaatgcgggggcagacacccggattgatgatgaagttctgtccaaaccccttggacagggaaaacccgtaccggtcgcacaggctgcggatggtggaaaggtcggtcaatgcaggcacacggcccacctcctgttagtgtgggatgtaaagcgtttttgcttggcgggcagagggttttcccctgcccttgcggcaaaacgcggcgaatcgcacgcccgccgctgcgttctgcgcacacgattcaccgcattttactgtatgcgcgtcccggcccggcagttttttccctgcgcggagggcggaccgcttgtgttattttcaggctcaaatcattgcccggtcagggcctgggccgcgctgaccgcacggacgatctgaggatcggtgtccacggtgaggtcatagtagctgctggcctcgtcggcagacagggtggattcgatatccggggtcaggccggtgccgttccagttctgaccctcattgtccaggatcaggcccagggtgatgacgatggcactgccgtcggacaggctctgcgggtcggacaggacaacgcccttgcccgccgtggtggtgcccaccagcgtggcgccgcccatcttgcgcagcgtgttggcaaacagctcggcgccgccggccgtgccggagttgacgatgcagaccatgggctgggtgatctcggtatcatcggacacgcgcaggtcctccaccgtgccgtcgttgagctgactctgggccatcaggccggaaggcacacagtagtcggcggcgatcagagctgcggtcaggttgctgcctgcattgttgcgcaggtcaaagacaaagctggtcgccccctgggagcgcaggctgtccaccgtgttgcggaactcggtgcccgtggtggtggcaaagtcgtcaatgcagatataggcgcagttttccccgatcatctggccgaacaccgtgctgaccgtgtagttggcacgggtgacgtcctgggtgacttcctcacgggtgggggtcaggtagtggatggtgacaatgctgccttcctctcccagaagggccgactggatggctgcagtatccgccaggttcttgacgctggtatccccgatggcggtgatgaagccgccgacctcaaagcccaggtcctcggccggagagttggagtagacccgggtgatgcgcgcatagccggaggaggtatccttgaccaccgccacgccgatgcccatcaggcggccggactgggtacccaccagttcattgtacgcctgggcggaatagtagcgggcgtatttgtcgctgatgcccagcatgtagccggaagcaatggtatcgttcagggtatcctcgttgatctcgaaatattcgttggcacgaacatagcggtcgatctccgacagtttgttgtacatacgttcccggtttttgacgctggtgaccgtattgttgaacatattcatggacaggaccatggtgatcgagaaggtcaccgccatagcaatcagcgtaacggtgaccgccacgctcaggctgacttttctactcataattgattgttctcccctctgcgcacggccttacatcgccagaagcgacaccacagccgagccgaacagcgtcacgcacatcagcaccgcaatgatcaggcaggtgatgcggacgacgatcttatgctgtttcataatactgcaagcctctcttttataccgtcatctcacaggcggcgatcaataggaaatatacggcaggacactgacacgcacgccgttgacgcgcatttccagatgcaggtggttgccggtggagttgccggtggtgcccacgtagccgatcagctctcctttgctgactgtctggcccacgctgaccaacggctgagaattcatatgggcatacagcgtggcataggtgttgccgtcgtccgccgtgccgtgatagatcatgacatagtatccgtagctgtaatggtaggtggcattggtgacaacgccgtccgccatggcatggatctcggtgccgccgggggcagcaaagtcagtgccgccatgaccgccgtcgccgaagtagcaggaaatgtacttgtagctgttgagcggattgatgaagtccagcgagcagtggatctgcacactggtaccgtactgcttgatctgagactgcaggtaagagtcataggcgttttccgcctcggtggccgcggcctggatcttcttctgttcctcggtcagggactgggccagagcctcggactcggagatggtggcgtcctgctgctggatgctgtttttcagttcctggtttttgtcgtccagctgatcgcccagatcggaaagggtggccaggttggcttccagttccgccttgtcgttttccaggtcctgtttctgggcattgagttcatcgtactcggcgtccagctccgcaaggacttcctcatccttttcataaatgtcggtgagggtctgctggaagctgagcagctcatacaggttggtcgccgcactgagcagagcgatggatccgccgtcgttgagctgctgcatcgccttcatgcggagtttgaaatcttcccagcgctggtcgatgtccgcctgcttctggtcaagatcggcctgtttctggtcgatctcctcctgcttggcggagatctgttcattgacttcgtttttctgggtggtgatcagatcgatctggctggtgatgacgctctgctgctgttccagcagctgcttctgttcttccgcatcggcaagcgtggactcattgtcagcgatctgctggttgatctcttccagctgtttctggtattcctgcttttgtttcagcagttcatccagctttgcatccgccgagacaggcgtcgccgcggacaataccagcgccgttgccgccgccgtacagagcatggcggaaatcaatcgtttccaattccaatgccggatatgcaaatagacatctcccttatcctctggatttcaaagtgccgcgcgggaatcagtacggcacataactgagcgggttgacacgcacgttgttgacgcgcagttccaggtgcaggtgattgccgaaggaatatccggtattgccgacatatcccagggtatcgcccttgcctaccgtctggccgaccgaaaccgacgccggagactgcatatgggcgtaaagagaaacataggtattgccgttttcatcggtgccgtggttcaccatcacatagtaaccgtagctgtcatgccaggtcgccgtgatgaccacgccttccgcgatggggtggatgggcgtgccgccataggccgcgaagtcggtgccggtatggccgtcctcaccgaactgggtggtgagatacttataggaatccagcgggcaggagaagttgagggagcagacaatgggcggcgttccggcattgtccaccgcctgcgccagcagcgagtccagctgctgcatggccaggttgtactgtttctgaagttccttctgctcttccgtcagactgttttccagggcttccgcttcggaaatggcctcattctgctgctgggcgctggcaatcagctcatcctgcttggattccagctggctggactgactggccaaggcgtccatctggctttgcagttcggtcttgtccgcttccagttcctgcttctgggcattgagctcctcatactcggcattcatctcggaaaggacttcctcgtctttctggtagatgtcggtgagggtctgctggaagctgagaagttcatacaaatcggtggccgaactgagcagcgcaatagagccgccgtcgttcagccgctgcatcgctttcatgcgaagtttgaaatcctcccagcgctggtcaatatcttcctgcttctggtcgatatccgcctgcttctggtcgatctcttcctgtttgctgctgatgagattttgggtgtcgctgatctgggtggtcagcagagagatctggttgcggatggtctgggcctgctgctccagcagtttcttggtgctctccgcgccggctttatcctcctgcgcgtcagcaatctgctggttgatttcgtcaagctgctgctggtactctgcgatctggtcccgcagttcctgttccgtgctggccgcagcaacatccgttgccgacgttcccaccacagcagcgatcatcatcgttccaagcagcatggatgctgctcgtttccaggttgcttttttcatgccgcctgcctttcttttgttgcagcgctgtcaaacgttcagatgtttgcggatactggtagccgtaccgatgccgcacagcacaaagcccagtaccacaaaaccgatcacaatatagtaccagacgctcgccagcggaaccagctgtccgccgaacatctgggaaaagttgctggggttttccacataccactggcacagggcatagtaggcgccgcagacgatgccggaagccagtgccgccgagatcaggccggaagtggtgccctccacaaagaaggggaaacggatgaagccgttggtggcgccaaccagcttcatgatgccgatctccttacggcgggcaaataccgtaatgcggatggtattgttgatgaccacgatgctgacgatggccagcaccgccaccaggccgtagctggcatagctgacaaccttctggatagaagtgaacgcctgggaaagttccagcggcgccgagacggtggcaacaccctcgatctggcccagctgcgcggagatctgctccagctgggagatgtcctcgatgacaacacgatagtttgccgagaaggggttatcgttctcgaacgcctcatacatattggcgtactcgtccagcatactgctgtaagtggcaagaacatcctccggggagacgtaggtcaccgacaccacaccgggcgtggcgcggatctgggagtcgatgtccgcgatttgctcctcggacaggccgtcctccaggtagacaatggattcattctgttcgccgatgtactccacaatggcatcgacgttgacgcccagcaggtaggccagaccgatcagcaccatgcagaccgtcagcacgcccatggacgcaaaagtcatcaaacggttggcccgcatactgtgcaggccctgccgtaccagatacgtaaaactagaaaaacgcataccgccagttcctccccatcaatgtacgtagtcaaattcttcgggcagtaccccgccggctgcctgataggcttcggcaatttcggggtgggcggtatccgatacgatatgtccgtggtcgatggtgacaacgcgcttgttgaagcggtgcaccagctcatgctcgtgggtaacgacgaccaccgtgatgcccacgctgttgatggccgacagcagttccatcatttcaaagctcatttcggggtcgatgttaccggtgggctcgtccgcgatgatgagcttggggctgtgggccagggctcgggccagggcaacgcgctgctgctcgccgccggaaagctcgtccggcaggcggtccatcttgtcccccaggccgaccaggcccagcacgtaaggcacgcgctttttgatctggcgagtggggatgttggtaacgcgcatggcaaaggccacgttttcataagcggtcatggtcgggatcaggcggaagtcctggaacacaacgcccatctggcggcgcatgtaggggatcttgcggcgcttgagacgggtcaggtcctgtccgttgataatgacggtgccttcggtgcatttttcctccagcaggatcagcttgaggaaggtggatttgcccgcgccggaatggcccagcacaaaaacaaactcgccgtcatcgatatgaagattcacgtcctccagggcgacgttttcatcattctgagtctcgtatactttcgtcacatgttcaaattcgatcatgttatatgctcctgttatgtcccctgccgcttgtgtatccatccgtccggcagtgtatccggaccatacatcctctgccgctgacagggcgcggctatacttatttagcttaccatgcaatccctccatgcgtcaagatggcccatcccggcacacttcccgctttttatcgtaaaaacggaattttccgcccatgtgttacacctctgggggattgtggaaagtttgtaaatttttttgaaatcggcagatttttgacgctgcaaaatgcaaatccctgattttttcttttcttgctcccctgacggaaataaaaaacggcatcttcggatgccgaaatggctccaaagatgccggagaatggcatatctgccgcaggcggtgcaccggggttctcccctgtccccgcccaaacggatcaatactttgccgggttggccgagaggtatttcttgaccatgagggccaccttgaacacgatggcatcgtcaaacttgcgcaggtcaaggccggtgagcttcttgatcttttcaaggcggtagaccagggtgttgcggtgaacgaacaggccgcggctagtctcggaaacgttgaggttgttctcaaagaagcgctggatggtgaacagcgtctcggaatcgagagaatcgatgctgtcctgcttgaacacctcgcgcaggaaagcctcgcacagggtggtgggcagctgatagatcaggcgggcgatgcccaggtgatcgtaggagatgacctgacgctcggtgtcgaacaccttgcccacttccatggcgatctgggcttccttgaagctggcagccagatccttgacgttgccgatgggggtaccgatgccgaccaccgctttgatgtagtgctcgccggaaagggtgtccacaatggaagcggccagcttttccatgtcgcgggtgttgttgtcgggcttgatctccttgacaaggacggtgtcggtctcactgatattgaaaacgaagtccttctgcttgtcggggaacaggccgctgaccacatcgtatgccgagatgtcgttgccgctggtgacgcggatcagcaggacgacgcggggcacatcggagacaaagtgcagttcccgtgccttggcgtagatgtcgccgggcaggatgttgtccagcaccacgttcttaatgaaattggtcttgtcgaacttttcatcgtggtactgcttgatgctctgaaggctgatcgacagcatggaggcgaactgctccgcggtggtgtcggtgccttccacaaagacggcatagtcgttatgttttgcgcccgagaactgatgataggcgtaaccgtcccgggtgaaagcatcgccggaagtcagccgctgtgcggcaaagccttcgcgcacttcaccgatctggcccagctcggaacacgaaataacagcaccggtctcatccaccacgccgacgacccggtcaactgcatccttcatctggtataccacgttttggaataccctgtttgccataacagcctctccttacctagcaaaatgtacagccttgctccgcggcggaatgcccctgcacagcgttgtgcagtttaccatctcaaatcccgccgtgtgcaagattgtgaaatttaccaaatacaaatacctttgatgtatattttacacaatccgcttgacttttgcaacatattttaacgaaatgttctggtttttcttgtataaattttttgccagttatgaaacggcaatccgacagacataaaaacggtgggcaaaatccgtcattttgcccactgtaaagccgtttgcgggctttcgccttccacaaaaacagcggcacggccgtccggccgcaccgcccgacattcaaaacacagcgccggaaatcctgcgcggttccgtcagtcttttttcttttcttccaaagttccggtgccgccttccaccacgccgcggcgtttgaacacgtagccgatggtgcggaagaaaatgctgcaatccatgccgaaggtgacatgggcggcgtactcgccgtcatactttgccttgacgtcaatgggaagttcatcccggccgttgacctgggcaagcccggtcagccccggacggacgtcgttggcatggaccttttcccgggcctcaatgaggtcgtactggttgtacagcgccgggcgcggccccacgatactcatctggccgatcaggatgttgtagatctggggcagttcatccagactggtcttgcgcaggaaggcgccgctcttggtaatgtaggaatcggcatttttcagcagatgggtgggaacgtcatggggcgtatccccccgcatggtgcggaacttgaggatgttgaaatgggtacggtcccgtcccacccggcgctggcggaacatgacagggcccgggctgtccagcttgatccacagcgcgatgatccccatggggatggccagcacgatgaccgccgccagagacaggataaagtccagcaggcgtttgatacagttctgatacaccggtcttatctcccttccccgccgtgtcagttcggcgtgttctgtgtttcggccagagccttggcgatctcggccttatccatgatcccggtattgccgtttgcggcgctgacggtatggtcctcgttcagacggcggttgggatgatagctgtgcacgatcttctggagctgccccaccacgccttcatcgtttttgtccacgtggagctgcaactgctgcagttcggtgtagaactccgccagatcgatctgcatgggcggtgcgataaagatcttgtcgtgggccgtcttgatcatcttatcctgctcggagtccagcatcagttcctcgtagagcttttcgccgggacgcaggccggtgatcttgatgtcgatatccacattgggctcgtagccgtaaaagcggatcaggcgagtggcaaggtccatgatgcggaccggtttgcccatatccaacacgtaaatgctgccgctcttggccagagcccccgcctgcagcaccagctgcgcggcctcggtgatggtcatgaaatagcggacgatgtcgggatgggtgatggtgacggggccgccctgtttgatctgttcctcaaacagagggatgacgctgccgtggctgcccagcacgttgccgaaccggactgccatgcacttcatggtggtgttctgggcaaaggtctggatcagcatttcgcagatgcgcttggtgcagcccatgacgttggtgggattgaccgccttgtcggtggacagctgaacaaagcgctcgacgccatgctccgccgccgaagtcagcaggttcttggtgccgaacacattgtttttcaccgcttccgccgggctgacttccatgagcggcacatgcttgtgggccgcggcatggaataccaccgacgggcggtaggtctcgaacacttcatccaggcggcgcttgtcgcggatggaaccgatgagcgtcacaatgggcaggtcgcggccgtatttgttgcgcagctccatctccagctcataggcgcagttttcgtaaatgtcaaagatcagcagctggcggggacggtagcggatgatctgccggcagagctcgctgccaatggagccgccgccgcccgtgaccagaacgactttgtcatgcaggtattccgagatctgggcgttgttgagctggacctcgtcccgggacagaaagtccgcggtgttcagttcgcgcaggcccatgccgcgggaggtgggattgccgctctcgtcgatggactgggggtcggacagcatacggacccggcaatgggtggagttgcagaggttgatgacctcgctcaggcgttcgcctttcaggctggtgatggcgatgacgatctccgcaatatgatacttgcggaccagttcgggaatgtccgagatggttccgcgcaccggcaccccctgcacgcgcaggttctttttggtcaggtcgtcgtctacgatgaccaccgggtcgccgaagctgcggtttttgttcttgcacaggttgaccgcccaggcgcccgcattgcccgcgcccacgatcagcagcggaacggtattcttgccccggcggcggtcctttttacgattccgcgcctgtgccacaaggttgcgcataaggcgccagaacaaccgcacaccgcccacaaatgcgacgttgaatacagcccccagcaccaggacggtacggtacagaacaccgtccagcataaggtccaccagcatgatgataccggtggacaatcctgacagaagcgtcagtctggccaggtcccgcatgccggcgtattcccaaaggatctcgtacaatccgccgaaccagaaaaccagcatatagatcagcagaatatacggcatccacggcgtcatggtctggataacgccgatgcgctggtaggcgtccacaccgtcaaatcgcagcatgatggcgatgaggtaggacagcgtgatcagcacgcagtccagcgccatcagcgcaagacggcggggcaggccccggatgatttggttattgttttgcttcatctgactgtattccccgtccctgacgcgcggcacacaccaaagttccggcggtgacccctctgtccgtgatccgccgggcgcgcgtctgaatattttgaacccgcttttcggtgcgcggccctgtaagaacacaaagccgccggacctcgtccgcagggcgaccggaaaaggcagattctcccttccctatcgcctgcacctgagcgctgttatatataatagtgtctgggcgcagcaaacgcatttcaaacatgcgaaccggtagccgcgccggttttatcctcttttttgtgtattataacacaagttcgctccgtctgcctctgccaatgcaaggcaaacggagcaaatcttgcacaaaattcatcagtttgttttgtatgaacccgtcaaatgcgcgcccgccctaaaaaacggtcctgcgtgaaaggcggaatcactccaccgtaacgctcttggccaggttgcgcggcttatccacgtccagacccttggcgcaggacacatagtatgccagcagctgcaagggaatgaccgaaaggctggtggcaaaatgcgggtcggtgcgcgggacatagaccgtaaagcccgccgtgtcctcgatgttatagttgccgtaggtggtcagccccatgaggaaggcaccgcggctcttggcttccaccatgttggagatggtcttttcatacaggtcgggctgggtcagcacgcccaccaccagcgttcccttttccaccagggagatggggccgtgcttcatctcgccggcagcgaaggcctcggagtggatatagctgatctccttgaacttcaggctgccttccagcgcaacggcgtaatccaggccgcggccgataaagaaagcgtccttggctgccgcgtatttgctggcaaaccactggatgcgctccttgtccgaaagggtcttttcgatcttgccgggcagggcttccagttcctcgaccagatgggcgtagcgctcctcgtccagagtgccgcgcacacggccgaactcggtggcaagcaggtaaattgccgccagctgggtggagtatgccttggtcgttgccaccgcgatctcggggccggcccaggtatacagcacggcgtctgcctcgcgggcaatggagcttcccaccacgttgacgatgcccagcgtgcggatgctccgggcatggcactcccgcagggcagccagcgtatcggcggtctcgccgctctggctgatgatgacggcgagggaatcctcctccaggacggggtcacgatagcggaactcgctggccacatccacctccaccggcaggcgggccaggctctcgaacacataccgcgccgccacgcccacgtggtaggcggagccgcagccgatgatatacaggcggcggatggagcggatggtgtcttcatccagggcgatctcggacaggtcgatgcggccgtccttgatgcggggagaaagggtatcccgcaccgctgcgggctgctcgtagatctccttcatcatgaaatgctcatagccgcccttttcggctgcttcggcatcccactcgatggtggagggcgtcttttcgatgcgctccttatcgatgttgtagaactcaatgtcgtccggcgtcatgcggacgatctcctgattgtcaatgtagtagaccgtgcgggtatacttgagcagggcgggaacgtcggaggcaatcaggttgccctgttccgacgcgccgacgatgagggggctgtccttgcgaaccgcgtagaccacgccgggctggtcggcaaacagaatgcccagagcatagctgccgcggacgtgcatcatcatgcgggtgatggcgtccagaggattgcccgccgactcgccgcagtaatagtagtccaccatctgggcgaccacttcggtgtcggtctgggaggcgaaatcgtagccgcgggccgtcaggcggtccttgagctcctgatagttttcaatgatgccgttatggaccaccgcgatcttgtggtcacgggaataatgggggtgcgcgttgacggcggaaggttcaccgtgggtcgcccagcgggtgtggccgatgccgcaggtcccggggaccgtggtgccgccgtcggtcatttcatacaaaacgcgcaggcggcctttggccttgacgacctcgatcttgcctgcggcgtcctccaccgcgataccggccgagtcatagccgcgatattccagcttggccagaccgtccagcaaaatcggcgcgacctgcgccttgccggtgaaaccaacaattccgcacatatctgttccctccattgcttgtatcgtttatgtcgtttatcatgcaccgcagcctgcggccgcaccgcgtttcatgtattcatatgcaacgcggcgcacagatttgttttgcgtttcccttgcgcgaacaaataaatcgttcgtcagttcaaacaaaaaacagggcggccgtcaagggcaacggccgccccgcagcgcgcattctccctttccagtttcttacaccaaaacaaagacaggctatctgcgcgaattaagcataccacacccggcgcgccggggcaagtcccgacgtgggaatgtcacaaaatcagccggcattttccacccggcgcgcacagaccacataccgtccattgctgctggaatactcacaggtggaaagcgtcagaagttcgtcgccgtattccggcgtgatgccgctgtccacatcgctgcggctctttgcctgggtgacaaactcgtcaaatgcggtttcatccatatcaatataagtattgtaagggaagctggtatccgccaccacgtcaatggcaaaggcggcaaatacctcataggtagcatcgccgtacagggtatcgaactcgatcaggggatgctcggcgtaatacgaggcttccttatatccggtcaggcagccgaagatggtcccggtcttcatgttgtggccgtagatgatcaggttgttgctgcgtccgtccgcgttgatggtgcagtcctcatccagatagggcacgccgtaattgctgtactctccttcaaagtcatggcggaggtagaagtccgcccgcgtaggcgaatacatgaccgggaagtcgaggttggtatcctcaatgctgatccagccgatgaactcggagttgcgctccaccagacgggcgaacttgtcggcgttggattcctccccggaagagctttccgccgtctcatcgatgaggtcggacagagcggcaaactccccttccgtctggcggtcatccagaaaacgcttggccagcaggccgccgctgaccaggaagatgattgcgaaaatcacaatggcgatggtgtacagcacatccgcgccgctgcgctttttcttttttcctttatttttgcgtcgggtattttcatactccatgtcgctgtcctggtcgtaagcggtccgtttgccctgctcggcaaacagcggcgcagtctgacggggcgccggacgcttctggggacgtttctccgccatggggcacacctcctgtattgacattttaattgatagcattacttcccaatattaccccattcgggccgggatttcaagtacagagttccgctttcaaacaacataatataaaattattttaagtttcgttgtatttgttgtccattgaacaaaaccgcgaaacagcgaggctttatcattccaagttgttttccatgccccggcattccggcattccgagcgttggcaatgccggcttggtaagggggaaattttcacagcaaacctttcgtgcaagtcctgtgcattagcgcgggatcatttcccaatcggaaaaatcttcctgcaattcctgcagcagcgcatagtaccgttccggcgcaaggccctgctcttccatgatctcctcgtccggcatgcgcctgtacaggccccgtaccaggcggtccttttcctcccccaggccgcgtacaaattcccacaaaacaacacagggggaaaaatctcccgtggtcggaaaataccgcatgccgaacggctccctgccgccgtcgggaacatcatccagggagagactgctctccagtgcgatccgctcactgcggcgcctgcgcatggtatccaggctgtcccggatgcaaaatgccgcaaaatcggaaaagtcacagcaccccgctacccggcggtattcccgggatgcttccagataggcgcgccaggcctcggcgctgcactcctcttccggcaggccgcttccaaaacgccgtacctgcaaatcaataaaccggctgaccgcccggtatttgagatccggccaggcttccccgttcattgctttttcctcctgcgggtgccggcgcggatggagcggtccagagcggcgtcgctgcgttctccgtccaattccccgacccaggcgtttgctcccgcattccagaacatcagataattggcggtgagcatgatgccgtcctccaccaaagcccgggccagttccacgtcccggcacatccctttgggggaaaatttgtagttaggttcctccgtggggaacagcagcacaaaacgtttatccgttttgtgccaggcaaacccaagttccaggctgccgttttttcgtttgacctcttcaagcagttttccgttcaatgccacacggccgtcgggatatacccgcagcacacacgcgtcccggacccgccgcatgggcgggatgcgttcaaaatcctccatgttgacggccattgtcgccaagtccttgcgcataccgttctcctttcacatcctgtcggatacaaaaaatgcccggcggtcagtgcggtccactgacacagccgggcgttttgatgcgttgttcagtttgcccgccccggcaggttacagcgtggaatagccgtaactgttgaccagagcgtcgatcctctgccccgccttgcagtaggggcattcgtgagagtcgtaggtctgataatcgggcaggtcgttggggtcaaagatggaggccacaggatagccttcgcactccttgacggtggcgaagatggcagccagaccggccaccatgccgccgtaatacttgaccgcctcaatggcagcctgggcggtatagccggtggtgacggatgccgccaggaccagcacatgcttgccggtgatcatgggcatggtgttttcccggaacagcagctggctgccggtggtgtgctccggcgtgacgacgtaaatggtctggtgggcgttcatgttgacaaagccgtcgcgggtcagctcgctggccaggcaggcaccgatgacctcggtgccgtccaggcagaggaccgtgtccacaatggtcgtcgccttataggctgcgaccagttcctttgccacggcgcgggcttcggacagacgagacttctgcatcgtcacgtcgatataataattgatatggctgtggctggtggcgaaatgcccctttgccacacgcaaatacagatccgcctttttcgtcggaagtttgaccatgttgattcccatcctgcacagctcctttcagcttttccccgcctgtatagcgggcgtgcgttatcactaattactattttagtgggattgacagatgcatgcaaccaaaaagcctttgaaaataccgccaaaatccagcaggcattttcggcgttttgccccttttggccgtgttttgtcccctgccgccggggttcggtttacagatttttgtcccgatgatataatgtgattaagtttgcggttttttcagggggatatattgggatgatgtataaactggccaatctcagcggcgataccgtagcggtgccgcagctgatcttttcgcatctggcgcgcaccgacggcgatgtgatccgggtggcgctgtatgtgctgagttccggctgcaccgacgcgcggaccattgcgcacgaccttggcctgaaaagcgtggaggctgccaaccgcgccctccagtactgggccggtgcgggtctgctggaaaaggaacggggctccgcacaggcggcggcccctgcggctcccgctgcggaggtcgacctgtccgccatcaatgacccctacgtgggcgttctgtgtgaggaagcccagaccgctttcggcaaggcactgagccgcagcgacctgcagcgtctggtcggcctttacctgaccgacggctggcagcccgacgtggtgctgctgtgctgtgcggaggtcgcccgccagggacgccgcacggtgggcgcggtagcccgggaactggtccgctggcgggaagccggcgtggagaccggcgaggacgccgagcggcatctgcgccgcatgaagcagcgggaagagtggtgtgtggaagctgccgggatctttggcattgagcctcacaccctgacccagtgggaccggcgcgccgtcgcccgctggcacgaggaatggcacatcggccgcgacatgatcgaggaagcgctgctgcgggccgagaatcaccgtaccatccgctatgtagacggcatcctgcggtcctggcgctcccagggcctgacaacggtgcaggccgtacggggcaagggcgcgctctcccctgccaacatccttgccaccggcaagacccccgcaaagcccatgaaagacatgttcaaccgcaactggaacgcggtatttgacgaagaaacagagggataagccatgcgtaccaaggacgaactcttccgcgccgcccagcgcgaggtggctgctcgccgccagcgcgccgtcacccgggccgaagccctgcgcgccgaggcactgcgccgtcaccccgagatcggcgacgccgaggcccagcgtacccgccttggggctgcctatctgatgaccgctgcccaaggcgcggacatcaccaagcgccacgccgcgcagaaagcctttgagcaggccggtgaaacgctgaacggggtcatccgggctgccgggtacgatcccgcggagtttgtacccaaatatacctgccctgcctgccaggataccggcatctgcaagggtcgtccctgctcctgtgtggccgaactggcccgcactctgcgccgggaggagatcaacgcggcttctcctctggctctgtgcagttttgactcctttcagctggaacgctatcccgccgaggtcgatcccgagctgggcggtcccgtccgggattacatgggcaagatcctggcctactgccgcaagtgggcggcggagttcagctccaaaagccccaacctgctgtttaccggcagcgccggtctgggcaagacccatctggccctggcggtggccgacgcagtcctggaccggggctacgacgtactgtacaccagttccgccgccctggccgcccagctgagccgggaacatttcgaccgggacaccgatgacgactggctggacgcctgcaaggaagcggatcttttgatcctggacgaccttggcaccgagttcatgacccagctgaccgtcagcgtattgtatgagctggtcaacacccggatgctctgccgccgccccaccatctacaccaccaacattgtggaccaggcggtgtttgaggcccgctacaccgaaaaagttgccagccggatgctgggcaactgccggatgttcaaattcttcggcagcgaccagcggctgaaataagcacaataaaaagaccgcccgccggggtatcttcccgggcaggcggtctttttccattatttatactgctttggggatggcatcagaacggcaggcggtcgtgtaccgacggcaggtatcccgtcagtttgtcccagaaacggaccaccgcctcgatggccagatacacgccccgcatgacggggatgaccagcgcccagaacaccagcaggatcaggatgccgcccagatccagctgcaccagttccaggatgggggcaaagatccaggccgcagccgctcccaggaaaagcattcctgtccagagcaccacatgctgcggcgtgaacgggcggcatacattccacagcaccgccagtcccactcccagcatgaccagggtgcagatggtggaaagttcagagttgggcaaatcgaaggcgtaggcaaaggcctgcacgcccaaaatcaggatcaggtcggtgagaccgccgggcagagccttccgaaacacgttgcgcaggaaatgcccgcggatgcgttcatggttgggctccagcgccagaatgaaggatgggatgccgatggtggtggccgagatcagggtcagttgcagcggctgaagcggatagggcatggcgatcagcagagtcagcaggctgagggagaaggagaaaatattcttgaccagaaacagcgacgccgagcgctggatgttgttgatgacccggcggccttccgccacgacggcgggcaagcccgaaaagtcggagtcggtcagcaccagctgggccacctgggacgcggcctgcgcgccggatgccatggcaatgccgcagtcggcatccttgagggccagaacgtcgttgacgccgtcgcccgtcatggccacggtatgacctgcctcctgcatggccttgatgagtttgcgtttttgctccggggtgacccggccaaagacggtgtgggtctcggcagcctcggcgatctgggcgtcggtgcgcagcgtcgaggcatccacatagcgttccgcccccgggatgcccgcctggcgtgccacctcgctgacggccacggggttatctcccgagatgacgcgcaccgccacgccctgctccgcaaagtaccggaaggttttgggcgcctggggacggatgcggtttgccaccgggatcagcgcaatgaaatgcagccctgccgacggaagcccgtcatgggggtccggctggctgtcacaggcggcaaagagcagcacacggtagccctttgccagatagggttccacctgcggggccagttcgggataccgggaccccgccacaaattccggggcccccaccacaaagctgccgtgccccgcaaaggtgacggcactccatttataagcggagttaaagggaacactcccctgccgcacccagtccgaagccccgccaaaccgtcggcacatggcccgggcggtatcgttttccggttcctgttccccgtaaaaggcaagcagggcttcccgcgtgcgggcggcgtcccagtttgtttcgtccagcagaacgggctctcccgcttccatctccggctcggtaatggttcccgtcttgtccacgcagagaacgtccacccgggccagcgtctcgatgcagttcatatcctgggccagcaccttgcgccgtgccaggcggatcatactgaccgccagcgccacgctggtgagcaggtacaagccttccgggatcatgccgatcagggccgccactgtggcctcgacggaatcccgcaaactcagctgaagcacgtcgtactgctgcaaaaacagcagaatgcccaccggggcaaggatcaggccgatgaagcggatgagcctgtccagcgagcgcatcatctcgctttttgccaggcgcacatcggttttggcttccaccatgaggcggttggcgtaggagtcggcccccacccgggtcagctgcgcccggcagtgaccggacaggacaaagctgcccgagcgcagaccgtcccccggctgtttggtgacggggtcggcctcgccggtgatgagggcttcattgacctggacctctcccgtgcgcaccaccgcgtcggcacagatctgctctcctgcgccgaactccacgatgtcgtcccgcacaagggcggtgggagccagttccagcacctgtccgccccgcaggcagcggactttatgcactgttaccagcgtcagcttatccaccgcccgcttggaacgcagctgctgaaaaatgccgatcaccgcattgcagaccaccacgcccagaaagcccatgttggcaaagctgcccaccatggccaggaaaaaagccagcaccacaaaaaccaggttgaaaaaggtgaagatattttcccgtacgatctgagcttcggttttggtgggagaggccacttcccggttatccagccccgccgccatgcgctccgcagcctgttccggcgtaaggccggtctgcgggtctggagaatggggcagtacgggaggtctggcgggttcccgctccccggattttgcggcaccgtccttttgccgcttgaattttgcaaacaaaggtttttcctccgttatgttttgaaagccttgccgcagctgtacggccccctgccgccataacgctgctgcgcggaatatatccagtataacgagggagtatgaacaaatatagcagcttttccaaaaaagcctgcggatttttggatgcagaaaggccgcagccctgccaaaacggcgggtctgcggccttgtgttctgtaattgcgcaggcggcctttctcagacgtcctgcagttccccgcgggaggatgccttgaggtaagcgtagataaagccgtccaggtcaccgtccatcacagcctgaacgttgccgttctcatagttggtgcgatggtccttgaccagggtgtagggcataaagacatagctgcggatctgatgaccccaggcgatctcattctggacgcccttgatgtcgtcgattttctccttatgctgctgcagggcgatctggtacagcttggctttgagcatttccagagcgtactcacggttctgcagctggctgcgctgggtctggcaggaagtcacaatgccggtgggcttgtggatcaggcggaccgcagaggaggtcttgttgatgtgctggccgcccgcgccggaggaacggtagacctgcatttcgatatcctcgggccggatgtcgatctggatgttgtcgtccagttcgggcatgacttccaggctggcaaagctggtctggcggcgggcgttggcgtcaaaggggctgatgcggaccagacggtgcacgccgttctcgctcttgagcatgccgtaggcattggggcccttgaccatcatggaagcgctcttgatgccggcttcgtcgccgtccagcacgtccatgacctccaccttgtagccgtgagcgtccgcccagcgggtgtacatacggtagagcatctcggcccagtcctgggcctcggtgccgccggtgcctgcatggaaggtcaggatggcgttggaatggtcatactcgccgttgagcatggtcaccagctgaagctcgtcgatctctttctggacttcgttgacggcttcctcaccctcggacgccagggagggatcgttttcctcctccagcatttccaaaagggtgcctgcatcctcatactgggcggtcaacttggtgaagcgctccagcttgttcttcagatcgctcatctcggcgtagaccttctggctgcgctcctggtcgtcataaaatcccggcatcgtcatctggtgttccagctcggccaggcgcttctggctggcttcaatggcgagcgcttcccgcaggtcgttgatcgaggtctcgaacccgcccagcctggatttcagttcgtcaatcgtgatcatactgtcaaatacccctgtctttctcgaatcgttctattttcagcatcagccgtgcgatggcacggcgcaaacttacacagtatcagtataccgaaaaaacagcctcttgtaaacaggcagcgaaaaaccggctcgatttttgctgctctgccccgcccggaaggccttgcggcggccattttaaccgttttgtagacagctgttaacagaaaattctttgctttttatatggtactggggtataatgtcgttaaacccggcgcaggcccgtattacaggcattttcgggcattgcgccgccccttttgcgcgccccgcttttccatcggttccggcatcttattttccgccgggagcccgacacggaagcgtcttgcctgccggctgcaccgccggggctttgtatattctgcgcgcagaatggatatgttcagaacacggaggctattgaatggcagattataaagggaaccactgtcccgtatgcaacgaagtttttgccgagggggacgacatcgtcgtctgccccgactgcggcaccccctatcaccgtgcctgctggttcaagaccggcgtctgcgtccatgcggacaagcacggttccggctttgaatggaagccggacatcgttcccggcgtagacgatacctgcgtctgccccaactgcggaacccccaacccggtgaccaaccgttcctgcaaccactgcggcgttcccctgcccgatccggacactgcttcggcacagcgtccccagcagcagggtcccgtttacacccgggatcaggccccccgtccccatgcttccacctccggcagaaatgccggcgcagacgcgggtgctgccaccggccgcaccgatgcctttggcggcatgttccgccgggaactgggccccgatgaccccatcgacggcatcaaggcccgggactgggccagctatctgggcggctccagcctgtactacctgatccagtttctgcgcatggatgagacccgccgcaaaaccagcgtttcctttgcggccttcttcctgggtcccatctacttcttctaccgcaaaatgtggaagaccggcgtcattttctcgctgatctccctggttttgactctccccaccgcgctggctcttctgcaggcggcggggtcgcccctggtcgcggggatggatctgggatggctgagcgctgccagctacatctgcgcgtttttgaactggtgccagatgttcatccgcagcctgtttgccctgtactggtacaaaaaagagtccgcccgccgcatccgtgagatctgcgaccgcgtgccggaaggcccggagcgctccgatgccctgatcctgcgcggcggcaccagctttgtggccgtggccgtttacctgctggtttatctggcgctggtggtcggcctgtactggctcatgggccccggccgcactgcagcggtcaacgccctgatgactgctttcatcatgtaagaccggccgccatggccgttttagcggagaacgcccggcacgctgtgcggcggtctccccgtaccgggaatgtccggccggaccggcatttcccacagcccatttaggaggaatcgtcaacatgaaaacaacactggtcattatggccgccggtatcggctcccgctacggcggcggcatcaagcagcttgccgccgtgggtcccaacggtgagatcctgatggattactccatccatgacgccatcgaagccgggtttgacaagatcgtctttatcatccgccgggacatcgaggaggccttccgtgaggtcatcggcgaccgcatcgaaaaagtctgcgccggccttggggtggaagtcgcctacgcctatcaggcgctggacgacctgccggaaggcgcacagctgcccgagggccgcagcaaaccctggggcaccggccaggcggttctggcctgccgtgacatcctgcacgagccttttgccgtcatcaacgccgacgattactacggcaaacaggcctatgtcaatctgcacgacttcctggtccagtacgacgcttccaagccgggccgcctgtgcatggccggtttcgtgctgaaaaacaccctgagcgacaacggcgccgtgacccgcggcatctgcaagatgaacgacgagggctacctgaccggcgtggacgagaccaagggcattgaaaagaccgccgacggtgccaaggcgggcgaccgggtcctggacccggaaaacctggtcagcatgaacatgtggggtctgacccccgagttcatggatctgctgaaagacggctttgtggaattctttgccaagccggaaggcgacatgaccaaggcggagtatctgctgcccatctacattgatgagctgctgcagaagggcgccgtcagcgtggaagtcctcaagacgcccgacaagtggttcggcgtcacctaccaggaggacaagcccgccgtggcccaggcctttgccgacctgatcgcccagggcgtttatcgctccgatctgttcagcgaccttacccgctgagaaaaacaaacgcttatcccataaaaatacaaattcccagggctgccgcgtcacggcggttctgggttttcttgtatgcggaacggaacatagccggggtccgcggccccgccgcgtcaaaagcacaaaagcttgggttttgcgcacatggaaaaggatgtaaaaatgcggtatcgtaaatttaacaggagggatacaactatgtcgaacgaaatgctgtccgccacctctcagatcaccgcccccgatgccaatcgggaccagacccttgccctggatgtcgaacgtctgctgcgcttcggcagaaagcacaaactcgtgcgcgacctggatatcatcgtcgcacgcaacacgctgctggatatcctctgcctgcccgctccctttgagggcagcgtccccaaggaagatttcgacacccccaccgagatcctggaacatatgctggatctcgccgccgaaaagggactgttcgacaacaccgtgccgcagtaccgcatcaactttgagacccgtctcatgggcgccatgatgccccgtgagagcgaagtctgcaaaaagttccgcaagctgtacgccaagaaaggcccccaggctgccaccgactggttctatgacctgtgcgtcgtgtccaactacatccgcaccgcccagatcgcccgcaacattcagtgggataccaagaccccttacggcgacctggagatcaccatcaacctgaccaagccggaaaaggaccccaaggtcatcgccatggagcgtctgcagcccaagagcagctaccctcagtgcatgctgtgcaaggagaacatcggctatgcgggccgcatcaacttccccgcccgtcagacccaccgcatcgtgccgctgaacctggccggtgagtccttctacctgcaatacagcccctacgcctatttccatgagcactgcatcatcctgcatgacgagcacaagcccatggagatgacccgccagaccctggcggaaatcttcgactttgtggcgcagttcccccactacacctgcggctccaacgccgacctgcccatcgtgggcggcagcatcctgagccacagccatttccagggcggacgttacgtcttccccatgcagaaagccaagatccgcacgccgctgcacaatccccgttaccccggcgtgcaggccggcatcctgaactggccggtctctgccgtgcgtctgatcggccgcagctcccagcaggtccagaacgccgccaacgacatcatgaaaacctggcgcgactggagcgatgagagcgcggacgtgctggccaagaccggcgacaccccgcacaacaccgttacccccatcctgcactatgacgatgagctgggctacattctggacttggccccccgcaacaaccgcaccaccgagcagtatcccgacggcatcttccatccccacaaggaataccacaacattaaaaaggaaaacatcggcctgatcgaggtcatgggcctggccgtcctgcccgcccgcctgaaagaccagggcgcccagattgccgacatcctgtccggcaaggcctccaacaccagccgtgaggaaggcagcccgctggctgtccatgccgactggatcgacgagctgatagccaaatacggcacggcgatgtcccacgacaaagccgaaaaggtcgtgcgcgacgagatcggcatcgtgttcagccacgtgcttgaaaacgccggtgtcttcaagcaggacgaggccggccaggcagctttcctgcgcttcctgaacgcggcaggtttcgtctgctccaagtaatcctgttccgctttttgcccgcagttctccgtggtccccacggactgcgggctttttgctgttttgcgggggatttttgtcgttttgggcgattctgttccgggcagggcaatccccctggcagccgtgtacgaatttacaactctacgcggtttacaataggccggaaaaggtataaaatgaagcatatcctgttgtgcgctttacagcgccaagaactgaacgttttgggaggccaaacgccatgtttttgaactcgatccccgcaaagcgtaccctttcccgactggccgcgatcgccctggccgggtgtttctttctgaccgcctgccagaaggataccgacagtatttccactgccgagaccgctaccgcagaaacgtccgccaccgccacctcggcccccggcggaacgcccacgccggcagaccccgtctccgcccagagcgggaccgtgctggccctgaccgaagacgccgggcgcagctacattgatgagacgctgttcatcggcgactccaacaccgcccgctacatgatgtacaccgacgagaccggcaccgccttcacttccctcgccaacaacatcggcgtggtcagcatgggcgtgggtgccatcaccaccctcaaatgcgagcagttcgtcggccacagcaatatgtacaccattcccgatgcggtggccatgctcaaacccaagcggatcatcatcgggttcggcaccaacaacctgtccggaacctccaccgatgcatcctctttcatcaaaacctacctgaccggattgcaggccattcaggaagcctggccctatgccgacatcatcgttaacgccatcccgcccctggacaagcagcgggaaaaccagaacctcaacatggtgcaggtggacgcctacaacgccgccctggccgaaatgtgcgaggaaaacggattcaagttcctgaactctgccgaggttctgaaagacccggctaccggctgggccaagaccgactacacgctgtccgacggcgtgcatctgtccaagactgcggtcactgccttttttgagtatgtccgcacccacgcctacatcaccgaggaccggcgtccccagcctctcggcgacattcccactcccaacggcacgcccgtaggcctgatttcccaggaccccattgcggtgcgcggcgccaaggttcccgtggaatttgttgccaccaaaggcggcagcctgcagggcaccaccagccagctggtcaagaaaggcgccagctgctccaccgtcaccgcggtgccggacaagggctggaagttcgcctactggacagcgtccctgggatcggcaggaagcagcgccagcctgacctttaccgttccctccaatgccgatgcgggcggtgtggtcctgactgcccactttaccccggacgaacacgagcacgattatgtggagctgaccgacaagcgcatcgaagccacctgtctcaacggcggcagctctacctatgaatgcagcatctgcggtgagatcattgagaaagacacctccgccctgggtcacgcctgggacggcggtaccgtgacccgcgaaccccagcagggcgttaccggcgagcggacctacacctgcacccggtgcgggaccaaaaagaccgaggagatccctgccttggcggttccgacgccgacgcccaagcccgaacccactccggtgccgacacagaaaccggaaccgacgccccatatccacagctatacgcagaccggttataccgcaccgacctgtgaggagcccggaagtgagatttacagctgcatctgcggcgatacccagatgaaagagcttcctgcaaccgggcatatctgggacgaaggcgtggagacgacgccccctgactacggcgttcccggtgtgcggacatatacctgcaccgtctgtcaaaagacaaggacggaagagattcccgctcttactcctacgcccgaaccgccccccgtagatccgccggaaggcggcgacggtggcgacggaagcaattcccagacggaaagcaccaccgaaacccaatcggtgccgactgacccgacaccggaaggctgaacatttcccacatcttttccccgccccggggctgctgcaggccccggggcggttctttgcggagccgcacggcattcccgacggcaaacatcaaatggaggaatcatatgtcaaaccagtctacccaggcaaccggccggcccatgctggcacgctttctgccctatcttctgcggtacaagggcatcttgttctttgacctgttctgtgcggcgctgaccactttgtgcgatatcgtgctgcccaagatcatgagttacctgaccaacgccgccaccgataccaccgtcctgctgaccgcgggcgtggtgcttaaactggcggggctgtatctggtgctgcggctgatcgacggcgcggccaactattatatgtccagcaccggccatatcatgggtgtctacattgagaccgacatgcggcgggacgcctttgcccatctgcagcggctgagcgacacctactattccaacaccaaggtcggtcagatcatgggacgcatcaccaacgacctgtttgatgtgaccgagttcgcccaccactgccccgaggaatttttcattgcggccatcaagatcacggcgtcctttgtcatcttgtgcaatgccagcattcccctgacgctcatcgtctttgcctgcgttcccctgatgggcgtggtgtcggtgaccctcaacctcaagctgcgggcagctttccgccggcagcgctaccagatcggcgagctgaacgccgcggtggaggacagccttttgggcgagcgtgtcatcaaggcgtttgccgccgaggaacgggaaaaggaaaagtttgaggccggcaaccgcgctttccaggagatcaaaaagaccacctatcattttatggctgcgttcagcacctccacccgcctgtttgacggcttgatgtatctggtggtcattgtggcgggcggcctgttcctggtataccagcgcatcaacgcgggcgatctggtggcttacattctgtatgtttccaccctcattgccaccatccgccgcattgtggagtttgccgaacagttccagcgcggcatgaccggcatcgaacgcttttacgagatcatggatacccccgtggacatcaccgacgctcccgacgccaagcccctcaccgtgaccgagggcggcatcgagttccgcgatgtcagctttgagtaccccgacgatcacaacaaggtgctgcgccatgtcaacctcaagatccgccccggggaaaacctggccctggtagggccttccggcggcggcaagactaccctgtgcaacctgatcccccgtttctatgacgtgaccgagggccacatcttgatcgacgggcaggacatccgcggcgtcaccctggaaagtctgcgcaacgccatcggtgtggtgcagcaggatgtctatctgttcagcggcaccgtggccgagaacatcgcctacggcaagcccggcgccacccgggaagagatcgaagccgccgcccgcatggccggagccgacggctttgtgcaggcactgaaagacggctacgacacctatgtgggcgagcgcggggtcaagctgtccggcggccagaagcagcgcatttccattgcacggctgttcctgaaaaatccccgcatccttctcctggatgaagccaccagcgcgctggacaatgagagtgaagtcctggtcggccagagccttgacgccctggcaaaaggccgcaccaccctgaccattgcccaccgcctgaccaccatcaagaacgccgaccgtattctggtgctgggcaaaaacggcatcgaagaggaaggcactcacgaagaactgctggccaaagagggcatctactatcgcctgtggaacggcctggtctccggacagactttgtaacgccgtttttcccggaacgctccacccgttccaaagccttatactttgtgtacctccccccttgaacgggcgggaggtattttttcgcccacttttgaaccgtttccattcaaattcccaatttgtgttcaaacggtgacaaaagtgttgagagcacttgcacaaattccacattatttttttataaattcatccaaatctataaattccatgcaaaatttgcttgctttttggggccccatcggctattatagtggcacagagcaatcggaaacggttccaatcactccaacaagaagagaaaactccggaaatttcaaccaaacagttttttaggaggaaaacacaaatgaaagctaagagaatcctcgctttgacgatcgcgtccgcgatggccgccggcctgctggcaggatgcagcggcagttcttcttcgggaagcacctcgacgtccgacacctccggtgctaccggcgagaccaccggcgcttccggccaggtctactacctgaacttcaaacccgaacaggatgaggactggcagaacctcgccgccatctacaccgagcagaccggtgttcccgtcaccgtcgtgaccgcagcccagggccagtacgagacccagctcatgtccgagatggccaagagcgacgctcccaccctgttccaggtcaacggccccgtcggtctggccaactggaaggattactgctacgacctgtccggcaccgaactgtactcccacctgaccagcgactccttcgcactgaaggacggcgacagcgttcccgccattgcctacgtcattgagacctacggcatcatctacaacaaggcgctgctggaaaaggccggctacaccgccgaggacatcacaaactttgagaccctgaagcaggtcgccgatgacatccaggcccgcaaggacgagctgggcgtcaagggtgccttcacctccgccggtatggattcttcctctgactggcgcttcaagacccacctggccaacctgcccatctactacgagtacaaggccgacggcatctcttccaccgatgccatcaagggcacctacctggataactacaagcagatcttcgacctgtacatcaccgattccacctgcgagcccactctgctggcttccaagaccgcgaacgacgccaccgcagagttcgtgaacggcgaggctgtcttctatcagaacggcacctgggaatacaacaacatcagctccctcggcgacgagaacctcggcatgctgcccatctacattggcgctgagggcgaagagaaccagggtctgtgcaccggttccgaaaacttctggtgcgtcaacaagaactccagcgaggaagacatccaggccaccatcgacttcctgacctgggtcatcaccagcgacgaaggccgcaaagccatgagccaggatatgggcttcgttaccccgttcgataccttcaccggcgagtacgcagcttccaacccgctgctcgaggatgccgaggcttacatcgccgccggcaagacccctgttgactggtgcttctccaccatgccttccgagaactggaagaacggcgttggctccgctctgaccgcttacgctgccggcaccggcacctgggacggcgtcgtgtccgcctttgttgacggctgggctaccgaatatcagctgtccaacggctgatcctcatcctgaaacgcccgattgcagtaaaaggtttcacacgggagagggcgatcgacatgagatcgccctctccccctttttctgagttccctccccggcggtcgggatccacatcattgcattagggggatcgatatgcaaaaaacaatcaagaagtactggccgatttttgtgcttcccacactggcggccttcatcatcggttttatctggccgtttatctggggcatctacctttctttctgccagttcaccaccgtgcaggacgtcacctttgtcggtctgtccaactacgccaaaatctggatcgacgatacctttactcacgccttcttcttcaccgccgcatttaccgtggtctccgtggtcctgatcaacgccttcggttttggcctggcgctgcttctgacccgcaaactgcgcggcaccaatattttccgtaccgtgttcttcatgcccaacctgatcggcggcatcgtgctgggctatatctggaaaacccttctcgacggcgttctgaccctgatgagcaagccgctgctctcccttgacgaaacctacggtttctggggcctggtcattctgatgtgctggcagcagatcggttacatgatgatcatttacattgccggcctgcagaacgtccccatcgacctcatcgaggccgcccgcatcgacggcgcaagcaaccgtcagatcctgttccgcgtcaagatccccatggtcatgcccagctttaccatctgcctgttcctgacgctgaccaactccttcaaactgttcgaccagaacctctcgctgaccgccggtgagcccgccaaggcttcgcagatgctggccctcaacatctacgacaccttctacgcccgcagcggtgcccagtggaagggcatcggccaggcaaaggccgtcgtcttcttcctgctggtggtcgtcatcgccctggcccagcttcgtctgacccgttctaaggaggtgcagcagtaatgacattccaggcaaaacggcgcaccaataccatcctgtccatcctgctgagcattctgtccctgatctacatctaccccatcgcgctgatcctgttcaactccctcaaggaagagcgcgccatctccaccacccgcgtttttgaactgcccaccgccgagacctttaccgggctggccaactacatttacggcattcaggagatggatttcctcaaatccttcggttacagcctgatcatcaccgtctcgtcggtcgttctgattttgctgtgctgctccatgtgcgcatggtacatcacccgcgtggccggcaagctgtccaagaccatgtattacctgtgtgtgttcagcatggtcgtacctttccagatggtcatgttcaccctggccaagacggcagacaccctcaagctgaacaatcccttcaacatctgcatcatctacctcggcttcggcgccggtctggccgtgttcatgttcaccggctttatgaagtccatgcccgtcgagatcgaggaagccgccatgatcgacggctgcaaccccatccagattttcttcagggtggtcatgcccatcctcaagcccaccatgatctccacggccattttggaaaccatgtgggtctggaacgactacctgctgcccaccctggtgctggatatccgtacctatcgcaccatccccatggccatccagtatttccgcggcagctacggcagcgttcagatgggcccgatgatggcctgcattatcatcacggttctgcccatcatcattttgtacctgctctgccagaagcacattattgaaggtgtcgttgcgggcgcagtcaaaggctgatatactttattggaaaaatatatctttgcaaaggagtgacctgccatgacgatccgggatattgcccgcgaatccggctatgccatcggcacggtgtcccgcgtactgaacaacagccctaacgtcagtgacgcggcccgcgcccggatcatggacgtcgtacggcgccacaactttcagcccaacgccaacgccaagcatctgaaactgcaatccagtttcgggatcgccatcatcatcaaaggtacccagaatatgctgttcatcggtattctggaacacatgcagtccctggtggaagcccacggctacgtatgcatgccctactacattgacgaggaagccaacgaagtggagcaggccatgctgatctgccaggaacgcaaaccctatggcatcgtgttcctgggctccaacctggatcacttttccgacgacctggccggactgggcgttccctgcgtcctggtgaccaacagcgccgccagcctggacctgcccaacctgtccagcgtcagcgtggacgacgcggcggccgccgccagcatgatcgagcatctgtacgcccaggggcaccgccgcatcggactgatcggaggcaatcccagcacatcacggcccagctttgcccgtcttgccgggtgccagcaggcgtttctgcggctggggctttccttcgatctttcccggcagtatgcctacgcccgattctccatggaaagcggctacgcggcaatggagtggcttctggaacactgcccggacctgaccgcggtatttgccctcagcgacctgatggccgtgggtgcgctgcgcgccctgaaagaccacggtctgcgtgtgccgggagacatctcggtggccggatacgacggcattgaactgggacgctactgcatccccagcctgacgaccatccgccagagcaccgaccgccttgctacccgcggcattgagatcctgctgcactgcattgaggaaaacagttccgcggttcacgaggtcgttccctttgagcttctgacgcgggagagcgtagcacctctcgcaccggcctgacggccatatttctgcccgcacagcaaatccccgcggttttgcggaaaccgcacagaacaaagaatatttgaaaaggtggaatcacacacatgagagccggcggtattttgatgcacctgtccagcctgccctccccttacgggatcgggacgatgggtgcggaggcaaggtcctttgtggattttctgacgtcggcggggcagcgttactggcagatcctgccggtatgccccaccagctacggtgactcgccgtatcaatctttctcgacgtttgccggtaacccttatctcatcgatttggatgaccttgcggcagacgggttgctttcccccgaggagtaccgctccatcgactgggaaagcacgcctgaccgggtaaacttcggcgccatgtaccaaaagcgctacccggtactgcgcctggcggcctcaaggctgctggccgcccctcccgccgggtatgagcggttttgccgcacccagtccggctggctgccggactatgccctgttcatggcgctcaaggacgaccacggcggcgcgccctggtccgattgggagcccgaactgcgccgtcgcgatcccgatgccctgtctcaggcccgcacacggctggccggggacattgatttctggcaggcggtacagtatctgttcttccgtcagtggggcgccctcaaacagtacgccaacactcggggcattcagatcatcggcgatctgcccatctatgtagcactggacagcgtggatgtctgggctgccccccaggagttccagctgaacgccgacctggagcccattgacgttgccggctgcccgccggacggtttttccgccaccggacagctgtggggaaacccgctgttcaactgggatgccatggaacaggacggctaccgctggtggatcgaacggatccgccatgtctgcggcatctatgacgtggtgcgcatcgatcatttccgcgggtttgcagggtattacgccattccgggcggcagcaccgatgcctgcggcggcagctggcgcaccggccccggcatgaagctgttcaccgccgtggaaaaagccctgggcaagcgcaacatcattgcggaagatctgggattcctctccgacgatgtgcgcgaactgctgcgcgataccggataccccggcatgaaagtcatggaatttgcttttgacagccgtgacggcggcgaataccgcccccacacctatccctgcaactgtgtggcctacaccggcacccacgacaacgagccccttgtgggatggttcgatactgcccccgaggactgcgtcgccaatgccgttgcctacctcggcctgaaccgggaggaaggctatcactggggcatgatgcgcggtgtctggtccagcgtggcagacctggccgtggtccaggctcaggacctgcttggcctggggcatgaatcccgcatgaacactccgtccactctgggcggcaactggtgctggcgggctttgcccggttcctttactcccgaactggcggaaaagctgcatcactgcatggagctgtacggccgcctgggatgatcgttcccctgaacttcatatgcaaaagccccatccgggcctgctgctgcacggtcccggatggggtctttttttgattcaatttgtggtttgtccccgccagtaagccaggcgcgggctgccgtccgccacgcggatgacgccgcagcgcacaaagcctgccttttccagaagatgctgcatcacccggttatcggcatgagtatccgcacgcagcgtccctgcgcgcgccccgcaccagtcgatacaggttccggcaatgccatggacccgccccgccgaagccaggcggtgaatggtggcatagggtgcctcatccggccatgctccgtcggagatgtgcgcgtaggtggggtcggccccgaaaatcaggcagaaggttccttccaccctgccctgccgggtgcagacatagcagacgccctgtctgatctgttcttccatcagggcgagaccgggatagtccggcccccactgggtgggattgccggtctggcgcataaagcggcgggcctgttcaaaaatgtccatgacctgcggcaggtcggccgcggtggcttggcggatctccacgtgtattcgtcctttctttccgtaggccgtccccggagtccgcagacagccgcattatttacccgaatcgccgtagtttttcagcacccgtgcggaggggtcatccacatcgcagccgggccatgcacggttgggcatccagtaatccacaatcatctcggcctgaccgggataatactgctcaaacagttcccgataaagcaggctttccttggtgaagggccgggcgtaggtgtagcggccgctcttctcggcaaattcctggtcggtgtagagcgtctcggcatactgtttgatgtcgtccaccatggagtggcccaccgcgtcggaaaaggccgccttctcccgccagaggatgttttcgggcagccagtcgccctcaaaggccttgcgcagcaggtacttgcctttgccgtaggtgttcagcttgcgcgccgggtcgatggacatgacgtaccggacaaagtccagatccccgaacggcacgcgggcttccagactgttgacgctgatggagcggtcggcccgcagcacatcatacatgaacagctcccggatgcgcttctggctttccgcctggaacgcagcggcgctgggggcgaaatcggtatatttgtagccgaacagctcgtccgagatttcaccggtgaggagcacccggatgtcggtgtgttcatggatatacttgcagaccagatacatgcccaccgaggcccggatggtggtaatgtcccaggtgcccagcatggccacgacttcctccagggcagcaatgaccttgtcccggtcgatgatgacttcggtgtggtcggcgcccaggtactctgccgtctgacgggcgtatttcaggtcgatggcgtcggtatccatgccgatggcaaaggtgcggatgggcttgttcagctttttggccgcgatggcacagaccaggctggaatccagaccgcccgacagcaggaagcccacgggagcatcggcgtccaggcgcttgtccacgccggccaccagcttttcccggatgttggtcaggatctcgggcatgtcgtcccggttgtaggcaggggtgtccgcaatatcgcagtagcggacgaaccgcccgttgcagtagtagctgccgatggggaacgggtagattttctggaccagtcccaccaggttcttcgcctcggaggcaaaggcaatggcccccgacttgctgtacccgtagaacagcggccggatgccaatggggtcccgggcggcaatgagccatttgcggcggctgtcgtacagaatcatggcgaactcggcgtccaggtgcgcgaacatatccaggccgtacttataatacagcggcagaatgatctcgcagtccgagtcggaggcaaaggtatagccctcggcttccagctcctttttggccgtgcggaagccgtacaactcaccgttgcaggccacacagtcggcgccccggaaaaagggctgcattcccgcatcggtcaggcccatgatggccaggcggccaaatcccagcagaccgaactcggtctccgcgacccggtgatcgtccggcccgcgggaggcggtgcgcagcagataggcttcaaactgctccttggacagatcccgtccggcataccccatgatacaacacatactggtgactccccttccctgttttgtcccggcactgccgggtacacctgaatctgcgggaagaacggatacaaaaaacagacagccattcgtccccttttcattaggacgaatcactgtctgactgatccgcggtgccacctaaattatcgtgcggtatgagcgcacgatccccttgttttcacgttcacctttgaaacgctgccgctttaacgcacggcctgcggcgcccatactgccgcgcaatacttacgcgggttccgtttgcagctggcgggtgttctttcccgtcaaggccccgtcccggcttgcagcatgtgtcgggctctctgtgcggcggcctgtctgacggtacttttcccgttcatcgcctttggatgctaacaatattaacactctaaagcgctgctgtcaagaaaagaattgccgttttggggttcagaatttatccgctccggttcgtgccgcgccaaccgggcgaaacacggccttttttccgcatggacggcccttttctcttcccgatttgccaagggcagcggtacgggaaaaattatttcctacttttttgatatgaatacttgtactttgctttctgccgtgctataatgtcgttgccacggtaaagctgtcaaaccggcccggatggattttgccgcccggacccgtggcatactaaattgcatattgccgccgcgcttgctgtacaggcggcatttaccattgtttcggagggagattatgcttgaacttcaacacatcggttttgaaaccgacgataacaaggagatcctgcacgacgtcagcctgacggtcaacgagcgtttcgtcgccgtgaccggccccaacggcggcggcaagtccaccctggccaaggtcatcgcgggtatttacaagcccacgtccggccgtattctgctggacgggcaggacatcaccgatatgagcatcaccgaccgtgccaacctgggcatcagctatgccttccagcagccggtccggttcaagggtctgcaggtcaaggatctgctgagccttgccgcaggcaagaacacctcggtcaccgaggcctgcaattatctgagcgaggtcggtctgtgcgcccgggactatgtggaccgtgaactgaacgacagcctgtccggcggcgagctcaagcgcattgagatcgccatggtcatggcccgcggttccaagctgtcggtctttgacgagcccgaggccggcatcgacctgtggagcttccagaacctgatccgcgtgtttgagaacatgtacgagcagacccgcggcagcattttgatcatcagccaccaggaacggattctgaacatcgccgacaagatcgtggtcgtcaagaacggcaccattgacaagatcggttcccgcaacgagatcctgcccgccattctgggcagcgctgacgccggctccgccgcgtgcagcgtgctggctgacaaagtagagggggtgcgcgcctgatgatggacgccattgaaaagaaccttttgaaagagatcgccgaactggacagcctgcccgtcggcgcatacaacatccgtaccaacggcggcctgggcggccgcaacaccaccgccaacatcgacatcgtgtccaagacggacaagcccggcattgacatttacatcaagcccggcaccaaaaacgagagtgtgcacattccggtcatcatcagtaaggccggtctgaaagacctggtctacaatgatttccacatcggcgaaggcgccgacgtcaccatcattgccggctgcggcatccacaactgcggcggcgattccgaacatgacggcatccacactttctaccttgccaagaacgccaagctccgctacgtggagaagcattacggcgagggcgacgagaccagcaagcgcgtgatgaaccccaccaccatcgttcacctggaggaaggtgctcacatggagatggagaccacccagattgccggcatcgacgacaccatccgcaagaccagcggtgacctggccgcaggcgccagcctggtggtgcgggaaaagatcatgaccaccggcgagcagaacgccgtgaccgactttgtggtggatatgaacggcgagggttcctccgccaacatcatcagccgcagcgtggcgaaagaccacagccgtcaggagttcatcagccgcatcaacggcaactgtgcctgcgccggacacagcgaatgcgacgccatcatcatggacgacgcctgcgtcctggccagccctcagctgaccgccaacagcgttgatgccagcctgatccacgaagccgccatcggcaagatcgccggtgagcagctgatcaagctgatgaccctgggcctgaccgaacagcaagccgaggaacagatcgtcaacggcttcctgaaataagaaagcatacagcaaacggcccccgcgggatattccctgcgggggccgttgtgctttgttttatgcgtcagtcctgggaaaggttttggccggcatcctcgtcgtcccggatatgcacggcttccaggtcatcgtccctggcaatgcgcacaccttccgaatccacaccgcggcggtcaaggcaccactggatcagttcctggcccaggccgtagagcgttgcaaagagcggcacgcccatgaccatgcccacaagcccgaacaggttggcgcccaaagtgaccgcaaacagcacccacaatgccgagatgccgatggagcggcccaggatcttggggccgataaaattgccgtccacctgctgcaggcagatgatgataatgagaaattccagtgcctgcagcggattgacaaagagaaggatgagcaggctgggaatcgcgccgataaacgggccgaagaacgggatgacattggtcacgcccaccagcacgctgatcagcggggcaaagctgatgcccagaatttgcaggatcacaaaaaggatcgacccgacaatggcggaatcgatcacgcggcccacataaaagccggtgaagttttcattggcaatgtggaagatgcgcagggtgttttccgccatcttgcggggcaaaagggcatgcaccacggtacgcagctgatgcagcagcttatctttgctggcaagcatatacacactgcccgccaccgacgtgaacaccgccaccacgttggaaacaagtgcctgcaggtatgccacgatctccggcgaagccgcaacggccatgctgtacatcttgcccataagctgttcataattgtccagcgcaaggatcaggccctgaaggttgatgccataagtgtcctgaatatactgcaacgtcccctggacattttcaatgtaaccgggaaggctggtgaccagcgtcccgatgctggagatcacctgcggcaccaccagccatacaagcaaaaccagcaacagtataaacagcacataggcggacaaaatggcgatccatctgagatttttccggtccttcagaatgtagtgggacatccagcggacaaaggggtccagcacataggccagaacaatgccccccgcaaagggcgacaaaatccccagcatcttgccggtcatacccgccaccacattcaagctgcgcagcagagtataaaacaggatgctggcaaaaacaatcgccagccaatcccggtttgtctccggctttttatccaaccatacctttccagccatgctccgtttgcctcatcgcgcagttgcgcactttccggggttttggcccctttcctttttactttccattctatgcactaccattgtagtagggttcaaacgacagtgcaagtaaactttttgtaacctttgctcagtgtctgtcgggaaagaccggcggatcttcgggcaaggggttgccctccgcgtcaattcccctgctggtcaggccagccgccaccagctggctcagcagcgtatacagcacggcgaacagcggcacacctaccaccatgccgggcaaaccgaacaggtcaccgcccagaataatggccagaagcacccacagccccgaaaggccgatggcatcgcccacgatacgcggggcaataaagttgccgtcgatctgctgaacgaccagaataaggatcacgaactccaccgcctggatggggtcagcaaacagcaggatcaacgtacccggcaccgcaccgataaagggtccgaagatggggataatgttcgtcacgcccaccagcacgctgatcagcggggcgaaatccaggccgatgatggacatgagcacaaaggtctcgacgccgaccagaagtgcgtccatcatctggccgccgatatatccgctgaacgtcttgttcgccatagaaaagacactgagcacgctttttgccacccgcggcgggaccgcagcatgcagcaccgcacgcaggttgcgcaggagcgtttccttgctggcaagcatataaatgctgcctgccaccgccgtaaacacagccaccagaccgcccatggcgttggctgcgtagtttgccaccgcaggcatgctgctggccagggcgccgagaactttggagatcatctcgctggaatcatccagcagttcgttggcaatggcaaggttgaggccgtatttttcctgcaatgtggtgagcaggctctggaggttatccgcataggccggcaggttggtggtgaacatgcggatgctggcggccagctggggaaccaccaggctgaccagcaccacaatgagcaaaatcgccaccaggtaggacaaaatcatggccgggatgcgcttgccgtggaacagctttttggcaaaaaagcgggtgggcatatccagcagataggccagcacgatagctcccgcaaagggagagagaatccccagaacgcggtccaggccgccccagatgtccggcagatgatcaaacagaaaatacgccgccacaccggcaataatcagaaaaagccagtccgaaaccatctccggtttccggctcaaccattttttcattccactcctccgttttcccgccgtgcggcacggcgaagccggctctgaccggcagtctctgtctttctatacgattcggcgtcccgggattccccaacgcccgatgtaaaatcacgattttatcaaaataccaaaacccggacttttgtgtcagcccgatacacgtctattgtaatatattccgtccggcatagcaaggtcagcaaaacggtcagaatttcagaaatgttcaattccgtagggccatgctttcaggctgcccatatcccatacattgcgccagccgttccggcgcagccactgtgccgcctgaaaagaccgaactccgctggcacaataaaccacgatgttccgcgttttgtccggcagaagttcctccgcgctgcgcgccagcctgccaaggggcagatgcaaggctcccggcagatgccccgcctgatattcccagtcctcccgcacatccaaagcgacggcaccggtatccaaaagccgctttgcctcaccgggttggatcgtaggcatggtttgtccccctctctcaatgaaaccttatcagcccgcaaaagcactcttatgccggcagggccttgtttcattgtatgcagcggctgcgcaagctatgacacggcgcccaaatgttttgccttgattgacacaggcctccgccgatggtatgctggttttcaagccacatccggcccggtgaaagccggatattctatctttgacagaaagcgcggaggtttttgatgaaactgcttgtcagtgcctgtctgctgggcatcgcctgcaaatattccggcggggataatcttgaccccgcgctgctgcaagccctgcgcaacgccgggcatgaactggttcccgtctgccccgaaatctacggaggtctgcccacgccccggctgcccgccgaacgccgcggcaagtctgtcgtcaccgaggccggtgcggacgtgaccgcccaataccgcaagggtgccgaagctgcccttgccctgtaccggctgtgcggctgtcaagctgccctgctcaaggcaaacagccccagctgcggcagcggcaccatctacgacggcagtttttcccatgtcaaaatctctggcgacggcgtgactgccgaacttttgaaagcaaacggtatccccgtctacaccgaacaggactgcgcggctctgtttgaataaagagattctcccctgtcgtttttgccaccggcagaacggacggcgcgcaggtcagccgcgcaaaccaaacgagccacatcaaaaaagcaccccggtatcaaaaataccggggtgctttttgttgcgttcagactgatttttcagagaatcagttgtttttgtagtagttgatgaggcagccgtccgccaggatctggcgttcgtccggggtcatatcacccaggcgcaccacaaagggagtgaccttgccctctgccgaaacggcgtaggcggtcatctcaggagcggcatccagcagcgccttgcgggcgtcggggacaaagacatagtcgcccagggcaaagaccgaggggtcctccaccaggaagggcagcatgccccagttgatgcagttggagcggtaacgcttggtggcgtactccttggcaaagttggccgcgccgcccagcacgcgctggcagctggcagcctgctcacgggcggagccgtcgccgggcttgttggcaaagaccgccgagccaatgttggcagcagccgggtccgcctggacgcctgccttggacagggcatcgtagacagcctgaatctctgcgggcagagtgcctgcgcggcgctggtcgtccagctccttcaccgccttggcacggcccacgtagcccgggtccttgcgggagagggtgaactccgccaggcgcagggggttggaacggaaggaggaagtctcgcccgaggggatcagctcgtcggtggtggtgacggggtcggtgatatagctggtgacattgaccagcaggtcatcgctgagagcgggctgctccggccagtccttgatgttggggccgaacttgagctcgtattccggctcggcatggccccagccgttgtagacgcgcttgtcgtagacgcccatatcaaagtgatattccggcgtgggaagaacttcgtccaggatctcgctggctgcggtcagcacaccgccgttggccgccgtagctgcaatggaacgggcatccatgagagccacggcagagatctggccttcaccgggcttggagccttcccggttggggaagttgcgggtggcatggcggatggagaactcgccgttggccggggtatcgcccgcgccgaagcaggggccgcagaagcattcgcggaagatgccgcccgcagagaccacatcggccaccgcgccgtttttgaccagttccagataggtgggcatgctgtccgggtagacgctgagacggaaggtccccgcaccgcagtttttgccccgcaggatctgggccacggcacagacgttttcaaaggtgccgccgctgcagcccgccacgacgccctggtcgatgcggatgctgccatccgccgccaccttgctgaccaggtccatgtggaccttgccggaaagctgctcattggcgcgggtctcgatctcatgcaggatgtccttggcgttggccttcagttcccggatgggataggcatagctgggatgcatgggcagagcaatcatgcactcgatggtggacagatccagctcaatgcagccgtcgtagtaggccacgtcggcgggcttcagctccttgtaggcctcgggacggccgtggatatcgaagtattccttggtgacctcgtcggtctgccagatactggaccagcaggtggtctcggtggtcatgacgtcgataccgttgcggcagtctgccgacagggaggcaatgccggggccgacgaactccatgaccttgttcttgacatagccgttggcataggtggcccccaccagcgccagagccacgtcctgagggccgacgccggggttgagtttgccggtcaggtagatggccaccacgccggggtaggccatatcataggtgcggcccacaagctgcttggccagctcgccgccgccctcgcccacggccatggtgcccagagcgccatagcgggtgtgggagtcggaacccaggatcatgcggccgcagccggacatcatctcccggttatagctgtggatgaccgccatgttgggcgggacatagatgccgccgtatttgtgggcggcggacagggcgaactggtggtcgtcctcattgatggtgccgcccacggcgcacaggctgttgtggcagttggtcagcacatagggcagcgggaacttttccatgccggaagcccgcgccgtctggatgatgcccacgtaggtgatgtcgtggctggtcatcgagtcaaacttgaggcgcaggttcttcatgtcgggggtagtgttatgggcctccaggatgcggtaagccatggtccccttgcgggcctcctcctgggagacgggcgcagtgtcgcacagcttgccgttgacaagatagacgcctttgtcatgcagtttcaatgtagagtccctcctttgccgtcacaggcgggcgatgagcgcgtcggtgaactgggtggtggtggcggtgccgccgatgtcggcggtgacggtggtgccctcctggaccaggctgtggatggcattggtcaggcggtctgcggcgtcggccttgtccaggtcacgcagcatcatggcaaaagccatgaggatggcggagggattggccatattcttgcccgcgatgtcgggggcggaaccgtggacggcctcgtaaatgcggaccttgtccccgatgttggcggagggagcaaagcccaggccacccaccagaccggcgcacaggtcgctgatgatatcgccgtacaggttgggggcgaccagaacatcgaactgctcgggacgctggaccagcttcatgcaaagggcgtcgatgatgacgtcgtcggcctggatttcggggtattcggcggcgacctcacggaagcagctgaggaacagaccgtcggtcagcttcataatattggccttgtggacggcggtgacctttttgcggccgtggcggcgggcgtagtcaaaggcaaagcggcagatgcgcaggctggccccgcgggtgatgagcttgatgccgttggcggtgtcgtcatccagcatatactcgatgcctttgtacaggtcctcggaattttcgcggacgatgaccaggtccacgttatcaaagcgggtgggtacgccgggcagcgagcgcaccggacgcagattggcgtaggtggagaaccgctggcgcagctgaacgttgatactgcggaagcccttgccgatgggcgtggccgtggggcctttcagcgcccagccgcagcgctcgatctcgtcgagaagcccgggctgcagcagctcgccgttggcggcggcatactctgccccggcctcatattccagccattcaatgccggtatccagcgcggcggatacctttttaacgctttgggcgatctcgcggccgatgccgtcgcccgggatcaaaactgccttcattagtatatactgcccctttcctgatgccggatgttccaccgtccggcagtttccggcctgcacgctgaccgcatgacagactatatagttttaagtatatcggcttgcatccgggttgtcaatcaagtacttttccggtttagagcgtcatatcacaaacttttttctttattttcttaagttcttatctgccttttttactttgttttaagtttttagcttgacttcaccgatatgattcgataaaattaaaggcatcacaccgcgtggcggttctctccgccgccggtttttatggagcaggcgcaaaggcggcgccggtttggatgtgtgcgcgtccataccggcaggcaaggtttttccggccaaggaagtccccctcaaaaccgccatgcacaccgccccgccagagggaaaggggaagctgccatgtattatccagccgtagccgcgctggagccggacgagatccggctgctgtgcgacgaatacctccagaacaactacatcgatccttcggactgtgagcggctcggcgtcaagcggggcctgcgcaacgccgacggaactggcgtcctggccgggctgaccaacgtctccaacgtcgtgggctacgatgccctgcccgacggcagcatcgtgcccatcccgggacggctgatctaccgtggcatcgacatcgacaccctggtccaggaggccgacgcccacgaccgtttcatgtttgaggagacggtctggctgcttttgttcggcagcctgcccgaccgggagcttttgcagcgtttctgcaagctgctggacgatcaccgggaactgccccgcggttttgccgacgacatgatcatgaactcgccgtcgcccaacatcatgaacaagatcgcccgcagcgtgctggccatgtacagctacgaccagcaggctgaggaccgttccctggccaacatcctgcgccagagcatcaacctgatcgccgagctgcccaccatgatggtcaacgcctaccagatcaagcgccgggtctatgaccgggagagcatgtatttccacctgcccattgccgggcagagcacggcggagcacattctgtccacctaccgtcccgaccagaagttcacccacgaggaagcccgcctgctggatctgtgtctgctggtccatgccgaccacggcggcggcaactgctccacctttacctgccgggtgctgtcctcctccggcaccgacacctatgcggccatctctgcggccatcggtgcgctgaaaggccccaagcacggcggcgccaacctcaaggtcatgcatcagctggactacattctggaaaacgtcagccccaacgccggcgacgatgagatccgggaatttctgcgcaagatcctgcgcaaggaagccggcgacggcagcggcctgatctacggcatcgggcatgcggtctataccctgagcgacccccgcgcccagatcctgaaagaccacgcccggcatcttgcctatgagaagggctttgaccgggagtacaacatgctgtgcgccatcgagcgcctggctccccaggtctttgcagaggcgcaccacggtcccaaaaaggtctgtgccaacgtggacctgttcagtggcctgatctaccggatgctgggcatcagcgaggacctgtacaccccgctgttcgccattgcccgtgtccccggctggtgtgcgcaccgtgtggaggaagtcatgttcgccaaccgcatcatccgcccggcctacaaatacctgggcaatccccagcagtacgttacgctgggcgaccgtgtcccccactccaccgagggataatcaggtttcctacaatcaatcaggcggcggcaggtatcccctgccgccgccttttggctgttttagcgtgtccgtcaatgcccggatacgaaaaatgcccgccttttcaggcgggcattgtttctttgctgttttcggcagatttactgcgcggaggccttgttgttacgcttggccatgcggctgatcttgcgggcagcggtgttcttatggatgacacccttgctcttggcagagtcaatggcggagacagcggccttgatggcggcgtctttatccgcagcgttgctgtcgatggcagcgtctgcctttttgatcactgttttcaggttggacttgatggccttattgtgcagagcctctttcttggcctgaacaacgcggtccttctgagatttaatgttaggcattcgttccacctccttggttccccataacagtattacctatgttagcataatcggcgcaatgttgcaagtggttttttacaaaatcagcgaaagttttttgtcgaactttcaatgcagcccttttcccgtgcttaaaaggtttcgttcctgcatacacatggacttgaagcgcggtccgggtacaagacccggtgcgcgtgttccattctcggcggagaggaggcgtatggtcttgaaacatttctaccggctgctggggcggatgctgctgggcggggcctccgctgcgttttgcgcggcgatgctctgggcgtcggtacagcttgccccgggcggctggctgactgctgccgcggtctttgtgaccgagcccgccggggcacgggacatcctgcacagcagcgcggccaagcctgccgcggcggaaagttccctgccctccatcacggacaccgtacctgagccgtcgccctcccctgcgccccagtccgaaaccaacgcagcggatgacggcaatggggaaagcacctccgccccgggaagtacacccgcaccggaaaccaccgccgccccggaacgccccgataacgccggggacattgccgcccagacctaccgccagggcagcggcgacggctacatcacccttgcggcgggcagcatcaagaacagcaccgacaatgatgatgccgtcctggccgaggccgctgaaacgggactgcctttttccatcgagctgaacagcgacgaaccccaggttttgattttgcacacccacgccaccgaatgttaccagccctgggacgatttgtggtatgacccggactttgcagcgcgcagcctggatacctcgatgaacatgtgcgcggtgggcgcccgcatgaccgacatcctgaacgaagccggcatcaacaccctgcacgacgagacgctccacgactcccccagctacaccgaaagctacggccgcagcgcccagacagcgcgggactatctggagcaatatcccagcatcaaggtaattctggacgtccaccgggatgccatcgaacaggacggcacccgcatcaaacccttgacccagatcgacggcgaggacaccgcccaagtcatgatcattgcggggtgcaacaacggctccaccgtcattctgcccgactgggagaaaaacctggcctttgccgccgcctgggagaccgagatggagactttgtaccccggtctgacccgccccgttttgtgcggctaccgattctataatcaagacgtcaccaccggcagcctgctcattgagatcggcggtcatgccaacacgctggaggaggcggtccgtgccggggagtacgcagccaaggcgctggcatccctgttcggtgcagcgtaaaacggccgggcttgcatccctctggggcagcgcatataatataggagttaaaagagagaaaaaactgctgccgggcgtaccgtttgatgcgggacgcaccacattccctgtcctttgcggcggcgcagtatacaatcatacaggagagtaaaaagtatgggagaaatcatgacccggccccggcgttttgcccgcaagcacccgcgtatagccctttggctggcctttacggcggtgtttgccctgctgtgcggcgtctggatcggcatttttgcggcaaacggaaagagttttatctggtacgcagataccatcaaacagcattacccggcgctggtgtactacgggcgctggctgcgggaagccgtccgctgtattttgtccggtgcggccatccccacctgggatatgagcatcggctacggtgcagatgtggtcactactctgagctattacgtcatgggtgaccctctcaacctgatcgccgcctttgtgcccagtcagtacggggagcagcttctggaagggctgatgcttctgcgcatctatctggcaggcctggcctttatgcccttcagccgccaccacggcaacagccggttcggcacactgctgggcgcggtggcgtatgcgttctgcgcctggacgatccagaccgcactgaccgagccgctgttcatcatccccatgtactgcttccccctggtgctgctgggggccgactacatctttgagggccgccgtcctaccctgtatattgcggccatcgccctgtcggcactgtccaacttcctgttcttctatatgatcgccctgctgctggtactgtacgcagtggtcaagtatttccgcaagtacgggatcggccagctgcgcactctgtggccgctgctgggcaagttcgtggggtacagtctggtgggcatcgccattgcagcggtgactatgcttcccaccgtgtttgagatgttcggcagcgcccggttctctctggaccgacaggtgaccagttacccgttcaccatgtactggaacctgatcgccaacctgaccactgccggcaaggtggacgagtactccacctactgcggcatcaccgccgtggccgtgctggccgtcatgatcctgtttgctcgccgtcgtcagaacaccgtcctcaaggcggcgtggctggtgatgctggcctttatgatgctgccctgggctggcaagatcctgaacggcttctcctatatgcagaaccgctgggtctgggctttcgccatgctggaggcctttatcctggcccgggtatgccccgacatgaccaagctttccggccgtgaaaaactgacattgtcggcacttttggccgtctactgtctgctggccttctggaaccgggacgtccgcaccgagtggacggtgctgggcagcctgctcatgctgctgcttgcggtgttcgtcctgtccgccggggatgcgccccgcactgtcacccgcgccgtgctgctgggcggctgctgcctgggcatcgtcatcaacatcggcttccagtacggcgccgacgaaagctataccctgggcgagtacgaacccgccgggtttgcctgggacgccaccgtggcgaccaatcccaccaacctgctcaaacagctggatgacgacagtctgtggcggtatgatacctccatgaatgtctatgtcaacagcgccatgctcatggacctgcacggcgtcagctacttcttcagcctgaacaacggctatgtctcccagtggatggccgagatgggctacaacacccctgaggaatacaactacgtgggtctgcacggccgcagcgtgctggattcccttttgggcgtcaagtatttcctctgcggcaccgattccacctccaccatgccccagggctacaagactgagcctgccctcgccatggatgtggccggcgtcaatgtaggcgcctacgaaaagagtgacgttctgcccatcggctataccagtgcggcacgtatttcccgcagcgattacgacgccatgacccctgtggagcgtcaggatgcccttttgaacggcgtgctgctggaggacggcgacggtgaaaatctggccgccgccgatacgcagagcgatgtggtgtttccggaggcggaagtcactttgaacggcattgagatggtggacgaaaacacctactattcgccccaggacggcggcaccatcacctttaccatcaccaagccggtcgccgactgcgagacgtatctcgtggtggagggcatggactacactgccaccaacccgctggacgccatgagtcaggaggagctggacgccatgtcccccgccgaccggctgtccctcaaaaagcagtattccaatttctggtgcaaagaaaaggtctatctgcgcctggtgtccgacatcggggagggccgcatcgactacgccatgcgcaacaaccagtattactgcggacgtcacgactttgcctacaatttcggctataccgaaaccggtatgaccaccctgaccgtggtgctgccctatgccgggtactacacctttgaccgcatcgacgtggagtgccagacctttgacacggtggccgaccgggccgacgtgctgggtgaggaagcactggaaaacacggtgctgggcaccaactcgctgaccggcaccgtcactgtgagcgaaccgaaggtgctggtcatccagattccctattcttccggatggagcgccaccgtggacggccagcccgccgaacttttgcgcgccaacaccgccttcctgggcctggaactggatgccggggagcacgtcatcgagctgcattacgagacgccggggctgaaagtgggccttgtgctgtcgggcgcgggtatccttgcctttgttggtatcgtggtctggcaccgcagacggcgcaatccagcaaaacctgccgggaaataaatttctttggcaggcggaaaacatttacaaccgcagaaaaacaggatataatgaaaaaatacccggcggcgtgcaaaaatcccagcgccgctgactgtgagggagtggactacaatggaaagaaccgagatcgcatctctttacaagcagacccctgccgacggcaccgaagtcaaggtgtacggctgggcaaagaccgtgcgtgactccaagaacatcggcttcatctcgctgaccgacggcagctgctacaagcccgtccagatcgtttttgaggccgccaagctggccaattatgccgagatcgccaagagcggcctgtacaccagctttgaggtgaccggccgtctggtgctgaccccccaggccaagcagccctttgagatcaacgccgacaccatcacggtgctgggtccctgcggccccgagtaccccctgcagaaaaagcgcatgagcgtggaatacctgcgcaccatgacccatctgcgtccccgcaccaacactttcaacgcggcgttccgcgtgcgcggcgaggctgcctttgccctgcacagcttcttccatgagaacggcttcacctacgtgcacacccccatcttcaccggttccgactgtgagggcgcgggcgaaatgttccaggtgaccacgctggatctgaacaacgtccccaagactgaggacggcagcgtggattacagcaaggacttcttcaagcgcccggtcaacctgacggtctccggccagttggaagccgaagccatggctatggctctgggcaaggtctacaccttcggccccaccttccgcgccgaggagagctacactccccgccatgcggcagagttctggatgatcgagccggaaatggcttttgccgatctgaacacctatatggacaccgctgaggcgatgatcaagtatgtcattcgtcatctgctggccacctgccccgacgagctggccttcttcaaccagttctttgacaagggcctgatcgagcgcctgcagctggtggagagcagcgagttcggccgcatcagctacaccgacgctgtggagatcctgaaaaagaacaacgacaacttccagtacaaggtggaatggggcaccgacattcagaccgagcacgagcgttacctgaccgagcaggtcttccacaagccggtgttcgtgaccgattaccccaaggagatcaagagcttctatatgcgcatgaacgacgacggcaagaccgttgccgcggcggatatgctggtgccgggcatcggcgagctgatcggcggttcccagcgtgaggaacgcctggatgtgctcaccgcccgcatggacgagctgggcatgaaccgcagcgattacgagtggtatctggatctgcggcgtttcggcagcgtcaagcacgctggctacggcctgggctttgagcgcctgatcatgtacgtgaccggtattcccaacatccgcgacgtgctgcccttcccgcgcacctgcggaggattctgatgcagcggtttgcagacgcgctgctggactggttctatgaaaatcgtaggctcctgcctttccggcaggagcctactccgtatcatatctggatcagtgagatcatgctccagcagacgcgcatgaccgccgccgtcccctactatgagcgctttattgccgagctgcccgaccccgccgccttggcggactgtgaccccgaccgcctgcgcaaactgtggcaggggctgggatattacagccgggccgccaatctgcagaaagccgcccgggtgatctgcgagcagtacggcggcgagctgcccgccgactacgacgctctgcgggctttgcccggcatcggggattacactgccggggccattgccagcatcgggttcggcatccccgcccccgccgtggacggcaacgtgctgcgggtatttgcccgtctgtatgacgacgatgccgacgtcacccgtcccgagaccaagcggctgttcacccgccgggtctgcgagcagcagccgcagaacaagccgggagatttcaaccaggccttgatggagttgggtgcgctggtctgcctgcccaacggcgcccctcagtgcgacgtctgtcccctggcggacgtctgccagggcagggccagcggccgggcgcagtcgctgccggtcaagcctgccaaaaagccccggcccgagttgcccctgacggtggcggtggtgcaaagcccccggggcgtgctgctgcaaaaacgccccgacaaggggttgctggcaaagctgtggcagccccttttgctggacgggcagctgtcctctgaccaagtccgcgccgtgctggatgggatgggactgcctgtccgcagtctttcacccctggggccggcaaagcatgtattcacccacaaagtctggcagatggagggctggctggcggagacggatgcctcccccgccctgccggagggctgcgtctgggccatgcccgaagagttggctgcccggtactccgtccccagcgcctttgcggcctacctgcctgccatggagggcaaagcagcgcatggcgccgagtaagggtcacggcttgcatggcctttcctacaaaagcagcaatcatacaatcctaaaaagggcggatgcccggtgtttggccggggcatccgccctttttaatgtaaggttacggttcaggtcacaggccgttctgacgggccgcagcctgcacggtatttttcatgagcatggcccgggtcatggggccgacaccgccggggacaggggtaatgtaggcggctttctcggcggccgctgcaaagtccacatcgccgtgaagtttgccgtcctcgccgcgattgatgcccacgtcgatgaccacggcaccgggcttgaccatatccccggtcacaaagcccgccttgcccaccgctgccaccaggatgtccgcgcctgcgcacagttccttcaggttggcggtgcgggagtggcagatggtgaccgtggcgtttttggcgagcagcagcagcgccgcaggtttgcccacaatattggaccggccgatgaccaccgcgtgcttgccctcaatggcagtgccggtggactcgatcatgcggatgcagcccgccggggtgcagggcagaaagcagggctctccgatctgcatacggcccacgttcaccggggagaagccgtccacatccttttccggaggaatggcgtcaatgaccgccttctcgtcgatgtgagcgggcaggggcagctggaccaggatgccgttgaccgccttatcggcggcaagctcccctaccagcttgagcagctcggcctgggtggtttcctccggcaggcggatgacccggctgtcgatgccgcagtcaccgcagtccttggccttgccgcggacatagacctggctggcggggtcctcccccaccagaatgaccgccaggcagggggtgacaccttgggctttcagggccgccgtctcagctgcggcttccgccttgacctgggcggcaagggcttttccgtcaatgatctgtgcctgcatggggtgcctcctcttctgtgtcgcggggttcggcggattcttccgccgcgtcggaaccggcggggacggctgcggcgttttcttcgccagaatcctcagtctccggtgcagtgtccaccgcggtttccggctttttttccgactcggtgctttcctcggcgggcgtttccgctttggatgcggcctcgtcatgggctttcccggcaagttccgccagttcccggttcatgtccgccgttgccttgacaaactcggcatggctggcagaggcagccagacgggacgggatcaccgcaatggggccgtcagccatcttgatgtccgccacggccaaagcaacttccagctgtttgcctttcgaccggcgcagaccgatgaccatcagcaccaccgccgcggccaccgaaagaagggcaaccagctgactggtgcgcagcgtctcggtgatcatcagggagtcggtgcgcaggccctcgatccagtagcggcccaggccgtaccaggcaacgtaggacaaaaacagctgcccgtggaaacggcggtgcttcataaacagcgccagcatcacaaagcccaccaggcaccagatgctctcatacaaaaaagtaggatgtaccggcatggaggggtcaacggtaataccctccgccgccagggtagcctgcacactgctgaggtagcgctcggtgccctcgctgtacatgccccagggcagggtcgtgttggtgccgaaggcctcctgattgatgaagttggcccagcggccgatgccctgtccgatcaagaagcagatgcccaccagatcgaacagcggcagaatgggtacctttcgccatttggcggccagtccgccgaagataaaggctcccagcacgccgccgtagatggcaaggccgccttcccggatgtcgatcatctgccagaagctttcgtactcaaagggcgcgaagatcacatagtaagcgcgggcgcagatgatggccgccaccgttccgataagcaccacatccaccaggcggtcggcgtcgatgccgaagtccaccgcgtaccggaaggcgaacagcatcgccagcagcatacctgccgcaatgatgatgccgtaccagtaaacgtcaaaattaccgatactgaacgccacccggttgagggtcagttccaggcccaggcccgggaattgcacatgataggtcattgttctcccacctctcggggccgccatgcggggccccatctctttggtatgtattgcggcatgacgccgcatgggttcggtccgccgttactggggcgtgatctccacataggcctcgttttccggcagcagcatgatctggagtgcctcgttggcgtcatccaccgtcaggcttgccagcgtggcgatctgctcttccaggtcaacgcctttcaggaaggccacggccatctggccggcggcgtcctccaccccttccaggacggtgagcagctcgccgtacatctggtttttgaccagtgtgaacagctccgggtcaacaccttcccggcgcaggcgggcgatctcatcccggaccatctgtgccacttcccgcgggcaggagctttcccccgtaaaggcaatggcgcaggcactgcgcgtcagcacatagtccccgccaaactcggggttgaccagggcctgatcgtacagcttgcggtagaggtctgtcagaccgccgcagaccaggctgggcagcatatcgcagagcagttcccgcttgacctcgccccggggaatgggctgttcccggtagcccaacgcaaaacagggccggttgaggggcatggtaaagttcagctcatgctggacgatgggaccttccggggacagttccggcagctgaacggtgtggggcgttaccggcttgtccaggccggcgcggcggcaggcctccaccgcctgttccagctcgatattgcccgccacggcaagcaccatgttgtccgggcggtaaaatgcatcggtgcaggcatacagcagttccggcgtcagctcggcaatgctctccaccgtgcctgcaatgtcgtcccggatgggatcggtggggtacaggcagcggaacagtcccgtcagcaggcgccaatccgggctgtcgtcgtacattttgatctcctggccgatgatgccctgctccttggcgatggtctccctggtaaaccagggcttgcccaccatgttgagcaggatgtccaggttttcgtcaatgcggctggtggccgagaaaatatagcaggtgcgatcccagctggtaaacgcattggccgatgctccggtcttggcatacagggagaaagcgtccccttcctccgactcaaacattttgtgttccaaaaagtgagcagtaccggcgggcagagtgatctttttgccgtccaggacaaactcccttgtagtggaaccgaaggccgtaccgtacatggcatggacggtgctgtatcccggcatggtccggcagagaacggtcaggccgctttccagaatggctttgcggcagcgcaccgccgcggcggctttttcgcggatggtactcatgcgtcggcctcctctccccggccggtcagcgcgtagcagaccgaatagctgtaactttgcaggatctcctgcacctgacggggggtgacggcacacatttcggccttgccctcctccggcgcggtgaggggctccccgcgcatgatctggccgtaataccaaccggccagcccggcaaggctgtcccctaccgagtcgatgccttccagcagggtgcggcggcactgttccagttcctcctcgtcaacggggcgggcgcagaggtcggacagttccttgagaattgccgactcggctttttcaatattggccgtttccacgccggagtccaccatcatgacgcccgcagcccgcagcgcgctggagccgcagtaatagcaaaggctttgtttttcacgcacgttgcggaacagacggctggtggccgtgccgccaaacacgcccatggccatgcgcagcacgtggatggagggcagttccccggacttatcccgggtgaacagcatacacagcttggcctgggtcaggcccgcgatctcctcggtgtaatggcgcaccggagcggcaggcaccggggacagcgccgtgacgccggccggcgcgcggcggacagaggccagttttgccagcaggcgctgggccacaggctcggcatccgctccctgtacgatgacgtcgatggacgcctgggagaggatacggtcatactccgccttgaccgactgcggagtgacggcatcgatgtcattgagatagccgtacagttcaatgcccgccgggctgtcgccgtagaaccggcggcgggcctggcgcacgcagtacagccgcttgtcgttgtactcggactgcagacgacggcgcagtgtctccttttcaatgcgcaccgcctcggggtcaaagctgccgcccacaaggtagggttcaaataccgtaccgaacacgatgtcggcataggaagccaccaggtcctcgtccgccagggcgaacttctgcttgatgccgcagatatcggcggacaacacgcggtcgcccccggcggtcatcaggtccacccccaggtcggcaccgtacagggctgccagacgccgggaaagctgcgtcatgtcagggcagcccgcatagccgcgctccaataccatggacaggaccgcggcgtcggtggcgctctgccggacggccggataccggagatggatggcgatgcggcagcggttgaatttttcagcatccagcgccgtcagaaagacgccgggcgcaagttgttttcgttgcaaagaactacctcctgcaatggggatttcatacctctgccgggcaatcgggtttgacgatgcgccgcggcaaaagagttacgtttcattatatgacttttccgaaagggtgtaaaggacacaacgcccggagaacacgttacggctccaccgccaccttgatgacgccgtcccggtgattttcaaacaggtcgtaggcttcctcgatccgttccagggggaaggtgtgggtgatgaggggcgtggtgtcgatgcggccttcctcgatcaggcgaaggatctcggcgcagtcgcagccgtccacgccgcccgtcttgaaagtcaggtttttgccgtacatatcgggcaggggcagggtctgcggaccgtcgtacagcgccaccaccgtcaccaccgcgttggggcgggcgcattcccaggcaaggcggaaggtctccggcacgccggccacctccagcaccacatccgcgccgccgtactctgacgtgttccggacaagctcggcgacgtcctcgggaccgacggtcaggacttcggggtaatggtcgcggacaaacgcacggcgggcggggtctttctcacagacgatgatatttttagggtgtttgagcagggcgcaggcaagagtgcagatgcccgtcggccccgcgcccaaaatgagcaccgtgtcgtccgggccgatgtccgagatacggaccgcccagaaaccggtggccagaatatcccccacgaacagtgcctggcggtcggtgaccgagtccgggatacaggtcagcccctggtcggcataggggacccttacaagaggcgcctgtccgccgtcgatgcggcagcccagcgcccagccgccgtccgggtcggtacagttattgacccagccatggcggcagaaaaagcactccccgcagaaggtctccacattgaccgccacccggtccccgggcataatgtttttcaccccgctgcccacctgttccactacgcctaccatctcatgccccacggtgatacccggcacggcacggggcaccgaaccgtgcttgatatgcaggtcgctggtgcagatgctggccagcgtgacacggacaatggcatcccgctcattttgcagaacgggctccggtttttccatcagctgaaagtttcctttggatacataggtatatgcgagcatgctgccgcctcctgaaacgcaggtccgcaaagggacccgcaatgtactttgctctattataacacaggcggccgggattgtatcccgccgggaaggatttgtccctcgggcgggctgggtcgcacagtgcggcacctttatataaggagccatcgccacccgagacaatgctttttcccgcccggcgccggcgtcggcggcacttgaatttgaccggcttccatggtaaagtgtatatggattacagaaaggtacgatattatgagtcatatgtcccaaagcgccgcccagggccagccgttctggcggtttcttgtttcttcgctcagttccagtgtggtggatctggcggcctttgcgctgctgtgtgtgccattccagcctctgtttggtgacaggctgtatattctggctgccaccatcgtggcgcgggtattgtcctcgctgtgcaactatctgctcaactattttctggtttttcacagccacgccacgcacacccgctcggcaacgctgtataccaccatcaccgtgctgaaaactctggcaagcgcccttctggtctcgctgctggtgggaattttccccgccgaggtccccgagcttgccgccaagatcccggtggactgcctgctgttcttcctgaactatctgctgcagaaaaagtttgtctattgaaacggccatgactgcccgcccgaacggatgcctttccgccccgttcgggcgggttatgttccggccgaatgttaggaggtttttccatgaacgattcccgttgggcgtccattgacgcctttgcagaagccaaccgtgacgcgatcctgcgtgacatcacccggatctgcgccgtccccagcgttgagggtgctccggaaccgggcgcaccgttcggcaagggtccccgcgccgccctggacaaagggctggagatcgccgcagagcttggcctggatacccataacgccgagggatacatcggctgggcccagaccggtcccattgccgatggtcagaaattcctggcgaccatcacccatgtggacgtcgtacccgagggcaacggctgggatgccgatccctacaccgtccgtgtccgggacggctggctgctgggccgcggcgtggccgatgacaaaggccccagcatcctgtgcctgtacgcgctgaaatacctcaaggacagcggcgtggctctgcgttatcccgtgcgcgctctgctgggtgccaacgaggagacccacatgcacgatgtggactactatgccgagcattttgccatgcccgctttctgctttaccccggacgcggagttccccgtctgcaacggtgaaaagggcggcttctccggtgagctggtctcccctgtgctgaccgacggcgtgatcgttgactttgcgggcggcgttgccaagaacgccgtgcctgaccgtgctttctgcgtggtgcgtgcggcggcttccgcctttaccgccactgagcaggtcaccgtggaggacaacggcgacggcaccgtcaccctgcgtggctggggcaagagcggccatgcggccatgccggaaggcaccgtcaacgccatcggtctgctggtcaactgcctgctggacagcggcgtatgttcccctgccgaggtcgcatacctgaaagttttgcagaagctgcatgcttccaccgacggcagcgccctgggcattgcggcagacgacggtctgttcagcccgctgaccatcgtgggcggcaccattgagaaaaaggacggcaagctgcgtcagagctttgactgccgttaccccaccaacaccgactgcgacaagctgaccgccgctgtgaccgctgtctgcggagacgccgccgtgctggaggatgtcagcagccgcgtccccttctatattcctgccgacagcccggccatccgcacgctgatcgacacctacaacgaagtcaccggcgaggacaaggagcccttcaccatgggcggcggcacctacgcccgtcacttcccctttgcggtcagcttcggacccgagcacaccgacattcctctgcctgattttgccggccccatgcacggcgcaaacgaaggtgcaaacttcgacaagatgatcgaagctctcaaaatttatatccttgctctgctgcggctgcaagaactggaattctgagtgtcgcttcaagcgcaccgcaagcacaatgaagaaaagagcgggtttgagaaaattctcaaacccgctcttattttttcgttcgtcgtttttactgatcgtcgcccgtatcctcggggccgccgtaaatcgagatatagtcagggtcgtcatcctgatccagccacgagaaaatcaggtagcagacaccggccagagcggccagtgcgaccaacagcttgaacagcgatttcatgcgcaatacctccctgcccgctgctgcgggccaaacgaaacaagatttgctttagtatagcacaccggcccaaaaagtacaatctctgccgacatgtaaattttagccttatgctatccgtggcatccaaagaaattgcaggcacaggttgacaaagtacagagcatgtggtaaagtaattcttgcaagttagcatatgctaataagcaaattattccatccgactttctattcaccgtttttgtcaaagtatttctgcacgctgttcagcctgtttttcgtcatccactgttttccgggcaaaagggcctgattttccaacaggcaacctgtctgggcgttatttccgcttcagcccgggtttgaagcacaccgactgcgtggtttttccggtgatggatgatggggtggatatttttctctccgtgagttagctatgactaatgcgcaatgttattttgaaaggaaggcgacttatatgagcaagattgcagtagtttattggagcgggaccggaaacaccgagcagatggcttccatggtattggaaggcgcgcagagtgccggcgcccaggtcagcctgttcacggccgccgaattttccgccgattccgtcgacagctatgatgcccttgcctttggctgcccgtccatgggttccgaacagcttgaggaatgcgaatttgagcccatgttctccgcctgtctggacaagctgagcggcaaaagagtaggtttgttcggctcctacggctggggcgacggcgaatggatgcgcaactgggtcgatacctgcaaaggcgccggcgctattctggtatcggatggcgtgatctgcaatggttcgcccgacagcgacgcagaggttgactgcaaggcgttgggcagtgcccttgcctgacctgcattttccttttcattttccttcttttgcttttttccattttctccgttatacaagcaaaacctccccgggccacagtggctcggggaggttttgttttccctgtattccctgatgaaagccagctcgcttacagcatggcgaggatctggctcttcggcttcgcgcccacggagcgattcacttcgcggccgttcttcagaacgaccaacgtgggaatgctcatgacgccaaactgcgcggcaagttcgcgctgctcgtcaacgttgatcttgcccacgaaaatgtcgctgcgctcctccgcgatctcatcgatgacgggagacaccatgcggcaggggccgcaccagctggcccagaaatccagcaggaccgtgcgatcgctctgcagaacttcggaattgaaattatctttggtaatatgaacagcactcattgcgctacctccttgatttgttgtgtgggtggtttctatggttagagtatacccattttttcctttgccgtctgtgatattgtcaccaatccaaagcaggtacatgttcgggcttttccctgccgcccattccccggagctgcggcggacgggacgttcccgtgtcctttgggcccgaggattccagacagcctccctgcatctcacacatatcctgccagaatcgtctggggcagtgggtttgctggcagcgctcattgcgccgctgctcaatggtcagtgccttgaaaaagcgtttccacatcatctgccactgtgcctcttcctcatccggaacggaatcatactccgtcatttccagataccgcacatcattgccccgccgcagcatggcaacttcatggacggcatcataaatcagaaaatcctcatccggcaggcggctgcaaaaatggggacgcagcaggggcaggatcatgtttttggggtggatcacggcgcccagcatgccgccccgttcctcaaagcgaaggaattccacaaaatgatgggtctcaccgttgaccgcccgctccagctgccaggcggccgccacatccgcatcgcccagcatacggtccacgcccttgcccgtggcaaaagccactcgcaggtatcgcagcaaaatcagttccttttccgggtcggtgctcagaaatgcggtggcacaccgttggcagacactcccgcccaggcgctcgatcccgcgccagacccggcgtgcgcgggccgggtcggtggggatttcccgttccgggaacaatgtaaggcgctcatctgccggagaacagacagctgacggcagttccttgcggcaaaagctttcaaacacacagcacagaaagccctgcatactgccgtcataacggtaaaccacatccgctacatctgccgggtaatgcatgtgattgcctcctgtttcaaaagggccgccgcctgcaggacatccatcccctgcgccgtcagatgatgcagttcaggggccgcatccggcagagccttgggcatacagtcgtcaaagctcagctgctgcacgccgacaccaaaggccttggggtccagcagcgcgttggcaatttctgcccgggagccgcgggctcccagatatccgttgcaggtgataaagtattgcgcccgtttcagtaccacgccgatgcgcttgagctccggcagacccaaatgctgcatttttcgcgccttgacgatcctttgcgcacttttggggccgatccccggtacgcggagaagttcctccttggaagccgtgttgacctccacggggaaaaactggggattgcggatcgcccagcagcatttggggtccaggtaggggttaaagttgggttccgcttcgctgagaagttcggcggcagagaaatgataataccgaagcagccagtccgcctgataaagccgatgttcccgcagcagcggcggacgggtggtaagtgcaggcaggcgggagtcctccaccacgggaaggtaggccgagtaaaagacacgtttcagtgcgtactttttatacagcgcttccgtcagcccgatgatatggcggtccgtctcgggagacgcccccacgatcatctgggtgctttgccctgccggggcaaagggctgggccgcacgatacacctgcatttcctttttgctttgctgtgactccaccgcaatctgacgcatgggtgctaggaccgcggctttctttttatcgggcgccagcaactgcaggctgttggcactggggagctctatattcaccgacatacggtctgccagaagccccaggcggcgcaccagcagcgggtccgctccgggtatggcctttgcgtggatatacccgcggaaatgatattcctcccggaggatgcgcagcgcttcgatcatgcgttccatggtaagatccggagtccccaccacagcgctggacaaaaacaggccctcgatataattgcggcggtaaaatccgatagtcagctccgccaattcccgcggggtaaaggtagctctgcggatatcattggagcggcggttgacgcaatagctgcaatcgtagctgcaaacgttggaatacagcaccttgagcagagaaacacatcttccgtccggtgtaaaagagtggcagatccccggtgccacgcagctgcccagacttccgtgctgtcctgcccggtccacaccgctggatgtgcatgccacatcatattttgcactgtcggccaggatttccagtttttccgccagatccaccgtcgtttccccctctcctccgctatttcaagccgtaaagtctttgatgctgatgttcctgcctaaggctttcatgctgtctgtactttccctgatccaacagcacaggcagacaagtccaaagttttttccacaaatcatttctggaatgtgtacgccttcaaccgtaataccccacaaaattcctgtcataacagcacacgccgaatttatcagtatatattactatttgcaaaaaagtataaaaaagaaagcccaccgaaacatcggctttcccgtgggcatatctttaccataaaaatattgtattcgttcgtgcagccagacctccaaaacaggcggcggcaagcgagacaagcaggacaaacgcaagtttttgcgccgtctttcattcaagcaaggcacaccttcctgcaaggtaacgaatctgcatcaggcactttatccaagtggctccaaccacataccggcagcctttttattgtccaaattatcggaccgatatagctgtatactaagtacatagccgaggggagcgccacaaacaccaaaggcttctcaccacttggttttggtctcgaccaccttaccggctatgtaaagatggtccagttcttctcccttgatgaccagatcttcatagtccggattaaagggatgcagcacgaccgcatttccgcggcgaatgtactttttcagagtgccttccccgtcggtgccgtaaaccatgacgcccagttccccgttttccaatgtggactggcggtgtaccagtgccaggtccccgtcagaaatgcgcggctccatgctgtcaccttttactacaaggtaaaagtagctggaagggtccttgacgcaggcatactcggtaccgtaatcctcctcgaaggctagtgcgccatatcccgcacgcacagttcccaccaccgggatggggctctcactgtaagagacgaagtggtcccccacaggtgcggtaaactccggctgctgcaaaccgaggagtgcatcggccgtggtgtccaggatttccgccaggcgcgccaccgttccagggtccggcgtggaacgccccgtctcccatttgccgaccgcctgctgggtcacccccaaaaggcgggacagctcagcctggctgaactttttattttttctggcctgtttcaaacgttccgaaaacataggctcccccaatcttccctgcgcgtacagaatctttctgttctgatgttttcattatacaaccaaaggtggtgcatgtaaagaacttttttgattttcaccaaccaaaagttgtaaattgtatcttgacaacaaccgttagttgttatatgatgagttcatcaaacaaccaaacgttgtgtattgaaccgttgcggcattcatttttcggttttatgatcgttttgtcagaggaggcattttcatgaatcttaccaatattaaacaggctgtctgcaagtttctcttccttgttgaggctgctgccttgttcattctgatctccgctgcacttcagggcacccttgcactgcctgccgccatcggatacggactgctttccttcgttggtgtgaacttgctttcctgcctgattctgcccaccgaggacatccgccccgagcctcgccgcgcttcccggcctgcaccttcccgcaataccgtgcctttgcaggtcgtccgcggcggacgcagtgccgcataatttccccggaccatgcagatcgttttgattctgcacgctgtatcgtgctgtgtctttgcggcataagtggcacagcaggtattttgtctgcaatctttctttcccctgaatggaaactgcatataacaacacaactcccctgcggctgcggaacccctgcgctactttccgttgtaccgcaggggatttgtgttttcatgcaaggatctatatgttatagtatagaaaaaccaacacgctttccggcttcaacctgaaccggagcaaggaagggaccgtctatgaatcagaaaaaccataccgttttggaagtctgcgcggacagctatgcttccgctatggctgccgtgcggggcggcgccgaccgcctggaactttgcagcgcacttgccctgggcgggctgaccccatggaccgaactactggcgcagatccgcgccgtcagtgacattactatccgctgcctcatgcgcccgcgcgccggggattttctgtacagccaggaggagatcgatcttctctgcgcccagatcaaagccctgcaccaggccggtgccgacggttttgtgatcggcgcactgcaggcagacggcgagctggatacccgtgccaccgcgcgcctttgcgaagcagcggacggcgcagggctgacgctgcaccgtgccatcgacgtaagccgcgaccctctccggacgtaccgcgacgccgcagcgctgggcatcgacaccgtactgaccagcggtgccgcggcaaattgtctggcgggacgggagaccatcgggaagctgcttgcgctccgggatgagatcagcggccccgagattctgatcggcgccggtgtcaacgcctcggtcatcaccgagctgcgcagggatttccccgccgccagagccttccacatgagcggcaagaccgaggtggaaagtgccatgcagttccggcgtcaggatgtgcctatggggcttcccggcctggacgaatggcatctgcaatataccagtgaagagtacgtgcgggctgcccggctggctttggatgcctctttctccgcacagaactgagtttggcaatttgtttttccatcacggacagaaaatttcacaattcaggcggcaaaaaagtctttgccgccttttcattttgttagattttcaatgattttttcttgcattcgcgttgaaaaatgaacgtttttttcatgacaaagcgtcacttttatcaatttcatggagatttccaccagcaagacctgtgcatttttgtggttttgaccaatcttgcgtaatatccctttcttttttgttacgaatgtgttaagatttgtttaacaaaatgtacgggctgccgcgaaccagagcagcccgtcgattgtgtaagcaaacgcgagagatcttaggaggaatgcttttatgatgaaatatctgcaaaagctcggcaaggcattgatgttgcccgtcgccgtgctgcccatctgtggtattctgatgggtatcggctacgccctggcgcccgccgttatgggtgctgaaggccccaccaccggtctggcctacaccatcggtttcctgctggtcaaggccggcggcgctctgatcgacaacatggcctggctgttcgctgtcggcgctgctgttggtctgtccgatgaccacgacggcacttccggtctggctggtctcgtcagctacctgatgatcaccaacctgctctcccccgccgttgtcggcaccgtccgtgctgctttcggttccgagctggttgagaattccgtcgagtacattgctttcagcaagatcgccggcaacgcctttatcggtatcctggctgccatcatcggctctgcctgctataacaagttcaagagcgctcagctccccgactggctggcattcttcagcggcaagcgctgcgttgccatcgtcaccggtctggtttccatcgtcgtcgcagttatcctgctgttcctgtggccgctgatcttcaccggtctggtcaacctgggcaacggcatcgccagcctggacggcatcggcgctggtctgtacgctttcttcaaccgtctgctgatccccaccggcctgcatcacgctctgaacaacgtcttctggttcgacaccatcggcctgggcgacctgagccacttctgggctggtgaaacctccgccgacgtgggctggagcctcggtatgtacatgtccggcttcttcccctgcatgatgttcggtatcctgggcgctgctctggccatgatccgcgccgccaagaacaagaaggccgctatcggtctggttgcttccgctgctgtctgcgctttcgtctgcggcgttaccgagccctttgagttcggcttcatgttcctgtgcttccccctgtacgttgtgtacgctgctctgtacggcatcttcaccgtcatcacctattacgtcggcttccgcgctggcttctgcttctctgccggcctgaccgacctgatcttctccgcttctctgcccgctgctgcgaacacctggatgatcctgcctctgggcctcgccgctttcgctgtcttctacctggtgttctacttcgccatcaccaagttcgacctcaagacccccggccgtgaggacgaagacaccgatcccgccgaagccaaaatccagctggccaacaacgacttcaccgctatcgcttccggcgttctgaccgccatcggcggcaagggcaacgttgcaaacgttgactactgcgctacccgcctccgcttcgaggttaaggacagcaccgctgttgacgagaaggccgttaaggctgctggcgctgctggtgtcattcgccccagcaagaacgcttgccaggtcgttatcggccccaaggttcagttcgtttacgatgaactgaagaagatgctgtaacagcttcttccctgccgttttctttcgggagttctggttcctcccgtatcttccgccttgggcgggcgccatcgcccgtccaaggcgattttatttgttgaaatgccatttttatctcagatagacataggccgttcacaaatatgtactataataattttatatgatcttccctgttccggtgtgaccggacaagaaagaaaaggagatgcaatcgtatgaaaatcattcgcgccaaagattattacgacatgtcccgcaaggctgccaacatcatttccgctcaggtcatcatgaagcccaactgcgtgctgggcctcgccaccggcggcaccccggtgggcacctacaagcagctgatcgagtggtacaacaagggcgatgtggacttctctgaagtgaccaccgtcaacctggacgagtaccgcggcctgccccgtgagaacgagcagagctactggagcttcatgcacgagaacttcttcaaccacgtgaacatcgatccttcccgcatcaacctgcccgacggcaccaacatggacgccgaagcagagtgcaagcgctatgacgaagtgatccacaacgtcggcggcatcgacctgcagctcctgggcatcggccacgacggtcacatcggcttcaatgagccgggttccgcctttgaactgggcacccactgcgttgacctgaccgatgagaccatcgaggccaacaagcgcttcttcgagaagaaggaagatgtcccccgccaggcctacaccatgggcatcaagaccatcatgcaggcccgcaaagtcctgctggtcgccaacggcgagggcaaggccgagatcatcaagaaggccttcttcggcccggtcactccggaagttcccgcttccatcctgcagatgcatcccgacttcacgctggtcggtgacgccgaggctctgagcctgatctgagcgccccgccttttataagaggaatttgccatgattatcaaacatgcaaatgtgtacacccccgagcatgtctttgccgtgggggatatcaccatccgcgacgggcgcatcgtattcggcgccgagccgctgcctgacgaggaagtcatcgacgccgaagggctttatgccttccccggtctgctggatctgcattttcacggcgcagtaggccatgatttctgcgacggcacggaggaatccatccaggccattgcggattttgaggccagcaagggcgtgcttgccatctgccccgccaccatgacgtacagcgaggagatcctgaacggcatcatggatgcggcggctgcccataaaaacggcaagggcgcggatctggtcggcatcaacatggaagggccgttcatcagcccggacaaaatcggtgcgcagaatcccaaatatcttgccgccgccgacgtagaaatgttccgccgcctgcaggcccgttccggcgggctgatcaagctggtggacattgctcccgaggagcccgcctccatgccctttatcgaggcctgccacaacgaggtgcgcatctccattgcccacacctgcaccagctatgacaccgcaaagcaggcctttgcagcgggtgcgtcccacatgacccacctgtacaacgccatgccgggcatctcccaccgggaacccggccccatcatcgcggcgctggaagatcgtgctgaagtggagctcatcaccgacggcgtgcacattcaccccgccatggtccgcttcaccttcaacacctttggggatgaccgcgtcatcctgatcgccgacagcatgatggcatgcggcctgcccgacggcgaatatagcctgggcggacaggcagtcacagtcaagggcccccgtgccaccctgaccgagcatcccggcgtcattgccggcagcgctacctgtctgtacgactgcatgcgccgcgctgtgctggatatgggcgtgccgctggaaagcgccgtccgcgccgccagcgaaaacccggcccgcagcattggtgtggattccgattacggctctctggccgccgggcgttacggcaacgtgatccttgcggacaaggacctgaacatctgcaaggtcattcagaaaggccgcgtgatcgtgggctgattgccaaaccggctcaaaaagagcggaatcttttgacatttgccccaaaaaaggtcggtttccacttgcgaaacgccgtgttctcgtatataataggcaacataaggtacgattccacggcgctcttgcgggaaacgccgttgtcaaagggggttattgcatggctatttcggagcctaccgcaattttttccattcgtgatgagaaggacgcagagatcaagaaggttgttcttcaggtttacagcgcactggaggaaaagggctataaccccatcaatcagcttgtgggctacatcctgtcggaagatcctacttatatcacgacttacaaaaatgcccgtgctctgatccgccgcgttgaccgcgacgatctgctgcaggcactggtccgtgattacgtccgccagtaacatcattgggtctcgttccccgcagagggtttccctctgcggggaacttttttgtattgcggcgtgacgaaagcgtaccttccgggaatcgcccgtggcatcccctgccctgcaaaaattttttgaaattccgggatttctgtaacaacttggatacattcctgcacgaatataatagatagatgatgagtatcttaaaaccgtgtcataattcttgtcaggaggtcacccccatgcccaatgccaacaaccgttccattgatattcccgtcaccgcaccccggccccgtcaggctctgcgccatggggaggacgcctttgccatggtcaatcgtcaccacgaggaggtcaaggccatgtaccgcgccgcgcagcagcgcacagcccccaaagaccgctgaccgtctgatacctcgcttctttctgcatagaaaaacgccgccgctttcccatccccttgcaggggccacggaaagcggcggcgtttgtttttatggatatgtctcagtcacggaaaaaggcgttctggaccgcgcagagcaccgcagcacggcctgcagtgaaattgacgccgccctgcaggtagcaggtgtagggcgggcgcagggggccgtcgcaggacagctcgatggtgctgccctcggtaaagctgcccgacgccatgatgaccttgtcggtatagcccggctcgtcggcgggttcgggagtgacaaagctgtcgatggggctgcccttctggatgccggtgcagaagccctgcaaggcctcggcgctgccggagtcaaagcaggtcacgatgtcgttgtgttcatcggtatagcgcggcaccggatggacccccgccagctccagcagacactgggcataaatggccgttttgaccgcctcgcatacaacgccgggggcatagtaaaagcccaggaaagtgtcccgcagcgcgtcctgggtgcatcccaggtccttgccgatgccgggggccgtgaagcggtggctgatcttctccaccaggtcggcgcggccggcgatataaccgcccgtgggggtaatgccgccgccggggtttttgataaagctgcccgccataatgtccgccccaacggcaaggggctcccgcgtctgggtgaactcgccatagcagttgtccacaaagacaatgacgtcgggattggctgcacgggccgtgcggatgaccttctcgatggtctcgagggagaaggcattgcgctgggtataaccgcggctgcgctggatgtgcaggaccttggccgcgggcgctttccgggcgatgccctcgtagtcgggctgcatgtcggcggtcagggggacttcgtcgtacagcgcgccgaactcccgcagcgtaccgcagcctttgcccgcctccccgatgccgatgacgccttccagcgtatcatagggacggccggttgccgccagcagcgtatcgccgggacgcagcaggccgaacaatgccaccgcaatggtgtgggtgccgctcatgaactggggacggaccagggcgtcctccgcccccatggcgcgggagaacacctcttccagcttgttgcggctgtcatcccagacaccgtatccgctggacccccagaagtgccgtgcctcgacgccgcagtcggtgaaggcccgcagcatcttgagctggttgtagtcccggatgcgctcggtggcggcaaactgttccgcacacagctccatggccttttcatccagggcaagcacctcgggcttgatatcgtaaaactgttcgatcataaaaatgccaattccttttctggtttcctgtattctttttattcgggcagcctatacagcgcaaaatccgggccttggtgcagccccatctttgcataaaagccgcacagggccggttcgcacagcagcaccacatccgtgctctgcgcctggcaggcggccatggcagtgatcagccaagcccctgtcccatgcccacgccagggcggtgcggtcatgccggcggccagataagactcgccgtcgtaacaggcacaacagcttaccgtagcggccagggagccatcccccgcccgcagcgcccaggtgttgcccataccgtgggcaatggccgtgcagctgtccgagtaaaagcgttcctgttcttcccggtcatcaaacagcagggcggctacctgtgccatgcggggtgcagtttccagcgtcagaccggcggacgcctggttttgcaatggagaaccctctgccgcgggtccgaagcccggcagggtctccccttttggcaggcagaatgccgcacggcgcaagggcgttttccatgggaagtatccctctcctgcccggcagagcaatgtccgcacaccgcaaaagcggagaaatgcggtcagttcctctacctcgtccttatcgcggcagccgccgcacagctgggcggaatccccccgcagcataagcgcaccgccgtctgtcaggcagaagcgccagccggagccgggcttttgccagaacagctccaggcgcatacccatggccgagcggaaatacagctgcccctggacccgggcggcgaattcctgcgcatcgtgagaggtctggacggcccggatcatttcagggcattgacgatgcgcttgtagtcccggccgcgcacctcaaagttggggtacagatcaaaggatgccgacgcgggcgacaggctgacgatgtcgccgggatgggcgctctgccgtgccatctccaccgcctgctccatggaatccgcatgaaggatggtcagctcactggcggcaaagtcgggatgttcccggactgcctgttcaatgcgggggccggtagcccccatgagcaccaggaccttgacgtgggccaggatctccggggccagcggctcataggggatcttcttatcatagccgcccgcgatcaggatgatcttctggtcaaagctgcgcagccccgcaatggtgcgggtggggctggatgcgatggagtcattataatactgcacaccgtccagcaggcgcaccggctcgatgcggtgttccacaccggtaaaggtggagccaaccaggcgcatggcctccacggggaccctgccccacacagccgcgatggcagccagcaggttttccacgttatgcagcccccgcagtttgacctcggagcggggcaggacgggcgttaccacgccgttctcggcatagcagagagtgtcgtcctctttgcgcaggaaagcgcccttatcggtatcgtgcaggcgagtgaaccagacctgttcgcccttgcagtcggaagccatgccccgggagacgtcgttctcgtagcccaggacggcgcggcagggcggctgctgccacagcagaatgttgcgcttggcgtcgatatactcctgcatatccttgtggtggtccagatggttgggcgtcacgttggtgaccaccgccaccttgggagagcggcgcatgctgatgagctggaagctggacagctccaccacggccacggcgtcgggcgtgacgtccgccagctggggcagcagggccgcaccgatgttgccgcccaggaaaaccttgcggccggcagcctcgaacatttttgcgatgagggtcgtcgtggtggtcttgccgtccgagccggtcacagccacgatctcacaggggcagtagtcaaaaaagagttccacctcactggtgaccatggcgccgtcgcggatggcctgctgcagcgcaggcttgaagtattcataaccaggcgtgcgcatgatgatgtcctggcccttaaaaccgtcggtatactgtttgcccaggctcagcttgacgttcaggcggcgcagggtgtcggcgtaatcgccgaattcttccaacgaggctttctggtcacacagggtgacgtcggcgcccatctccacaaactgctcgatgcagcgtttgtggctgacacccgccccgataaaggcgacctttttgccccggatcaattctttcagtcgatcaatgggatacatggcagttcctcctcccaaattgccggatgtgcgccgggcaggcagcgccgaacaggggcggctgctcccctgccccgggcaggcacatccttccatctatgattatatatgccatttcatgcaaagtaaatcgctgcgcaaaaaaagcggcccctgcgcggggaccgctttgcagttttggaaaaaggatcagacttcgccgcccatggggatgccgtgcttggtgagcagagcgcggatcttgacgatgggatcgatgatgctgctgaccgacttatcgtggttgatggcagcaatgaagtacgcggtgtacttggaaacgtcaacgtcgaagtaccagtcacgcttgagcagctcgggggtgcggtaggtcaggttggtgcccagcacagccgagatgatgccgtctgcataggccttgtcgaacttgtccaggccggaggtgaacagcgggaaggtggcgcaggtgaagatcttgcttgcgccgcgcatcttgagctcgtaagcgatgtccagcatgctctcgccggaagcgatgatgtcgtcggcaatgaacacgtccttgccctcaacgctctcgcccaggtactcatgggcaacgatggggttgcggccgttgacgatgcggctgtaatcgcggcgcttgtagaacatgcccaggttgcagcccagaacgctggagtagtacatattgcggttcatggcgccctcatcgggagagacgatcatgaagtgctccttggagaagttgacctcaggcacatggtgcagcaggcacttcagaacctgataggtgggcatgacgttgtcaaagctcatcagggggacagcgttctgaacgcgggggtcatgggcatcaaaggtgatgatgttcttgacgcccatggcgcgcagctgctgcagagcgtaggcgcagtccaggctctcgcgggagacgcggcgatgctgacggccgccgtaaaggctgggcatgatgaccgtgatacgatgagcacggccggaagaagcctggatcaggcggatcaggttctggaaatggtcgtcgggagagaggtgattctcgtatccgaacagcttgtaggtgacgctgtagttgcccggatccacaaagataaacaggtcgtcgccgcgggtggatgccttgaccaggcccttggcgtcaccggactggaagcgggggcagtccgacgggatgatgaagctgtccacatccatgccgacctcacgtgcccagcggaccaggtgtccgtccaccagctttgccagctcttccgcgccgggacatgcgatcaggccaaggtctgcgatagcgtcttccttgacaaaaaagtcgcgagggcccagattctgttcgtccatatttttcgtactccttctctgtgtttcgccgttctttcagcggacaccgcctgccgcggcagcccgcaaggttaccattgaggattcctttatatacagataccatccggctcttttggggtgccacaaagggcgcaacatccccagcaatcatttatattgtagcacagagcagccctaaaatcagcactccggcgcagaattttccgcattttccgacattttgtcaccttgcacatcacgcttttgccaagcctcgccaatttctgttggcttttaacaaattgttcaaatttaccgttccgcaaaggcaaaagagggcgataaacggtgctttattgctccaaatcggcaagttttttctcggttttgcacgcccttttattggaccgcgcttcccgaaaatccggacaccaggctgatgatcagccacagcagcagcgccacgccgatcacgccatggacgatgcggatgcccctgtcctgcgtctgccggaaagaccataccgcgtttacgatccacagtgcatagaccagataccagccgataccgggcagaagaaagaggatcagcagcgttgcaatggtgaagatggaaacccgctgctgggtatcctgcatccgtttggccaggtttttcaaaaaatccattgggggaactcctttcgctctgccgtgccggggcagtccttatacttttagaatagcatatctcccctgctttacaccatacgcacaatgcacaatgcggcggcaaagttttccggtatgctgttgccaaaatgcaaaaaaggacgctgcccgaaagcagcgtcctgatctgccccgtagggcagttctcatattgttgagaagatcaagcggtcagaaactcagaccagctcgatgatagccatctcggcagcgtcgccgcggcgcatacccgtcttgatgatgcgggtgtagccgccgttgcggtcagcatacttcgggccgtattcgtcgatgaccttcttcgccacgtcctccttggtgatgtaggagaagatctggcgctttgcgtgcaggtcctccttcttgccaagggtgaccatcttctcggccatggaacgaacttccttggcacgggcgacggtggtctcgatcttgccgttctcaaacagataggtcaccatcgcgcgcagcatcgctttgcggctgtcggtggcgcggccaagctttctagtaccgggcattccgtttcactcctttttgtagatcgcctgccctgtaaagggcggctccggcgaaatcgccgttattgcgggacaccgcgcaggcgtccgcattcggccagcgggccgtggttctcagttatcgtcctcgtgggtaagcgtaaagcccaggctgtccagctttgccatgacttcctcaaggctcttacggcccagattgcggaccttcatcatctcgtcctcgctcttgctgacaagatcgccgacggtgttgatgccggcgcgcttgaggcagttgaaggaacgaaccgacagatccagctcctcgatggtcatctccagagccttttccttacccttttcgtcgttttcgaccatgatctcagtctcggccgcctcatcacagaggttgacaaacaggttcaggtgttcggtcaaaacgcgcgcagccaggctcaaggcctcctgtgcggagatggtggcatcggtccagacctcgatggtcagcttgtcgtagtccgtgatctgacccacgcgggtgttctcaacggaatagttcgccttgagaaccggggtgtagatgctgtccacgggcagagtgctgatgtcgtttttctcaacgatcgccagcttgttgcgctctgcggggacataaccgcggcccttgtcgaagctgatctccatcacgagtttggcgccctcgcccagagtggcaatgtgccagtcggggttgaggatctcgaggtcatcgccctgcttgatgctgccggcagtaacctcacacgggcctgcggcttccacgcggacggtacggggaccttcgccgtaaattttggcagcgatgcccttcaggttcaaaacgatctcggtgacgtcttcttttacgccctcgatggtagagaactcatgcaccacaccgtcgatcttgacgctggtcacagcaacgccgggcagcgaggacaacagcacgcgacgcaggctgttgcccagcgtggtgccgaagccgcgctccagcggttctacgacgaacttgccatagcggccatccggggaaaggttgaccatctcgatcttggggcgttcaatctccatcataaaaaccctccttgatcaaccggcactggccggttttgtctgcctgcctgaatccgccgcagcctaagcggctgcggccatgctttgcagcaaatgttcaggcagcccgtttgtgtaaaaactcgttcggtggcagaggattacttggagtacaactcgacgatcaggtgctccgcaaccggcacatcgatgtcctcacggacaggcagcttggtaacggtgcccttgagagcgcccttgtcgcgctcgagccactggggcagcagaacgacgggagcgtcctcaccggtcagcttggagaacttgacggaggaacggctggaagccgcaacctcgacaacgtcgccggccttgaccaggtaggaaggaatgttgaccttcttgccgttgacggtgaagtgagcgtggctgaccagctgacgagcctcgcggcgggtagcagcaaagcccagacggtaaaccacgttgtccagacgacgctcgaccaggatcagcaggttgtcgccgggacggccgggcatacgggtggccttctcatagtaagaatggaactgacgctccataatgccgtagacgaacttgaccttctgcttctcggccaactgaagggcatactcgctcttcttctttctcatctggccgccaggattgcgattggtgttcttcttcgcataacccataacagcaggagaaatacccaaagcgcggcaacgcttggcgatcggctgtgtattcttagccataattcagtttctcctttcgatcaaatgcggcgacgcttgggggggcggcagccgttgtggggaatcggggtgacgtcgcggatcatggtgacctccaggccggtagcctgcagggcgcggatcgcgctttcacgtccggaaccggggcccttgacatagacctcgacggtcttcatgccatgctccatcgcggccttggcagcaacttcggcagcgctctgcgcggcaaacggagtgctcttgcgggagccgcggaagttcagcgcaccagtgctggcccaggaaacggtgttgccctgggtatcggtaatggtgacgatggtgttgttgaacgtgctctgaatatgagcagcgccggcactgatatttttgcgttccttcttcttagtgcgggtctttgcactggatttcgtagcagccatttcagttcctccttacttcttcttgttcgcgacagtgcgcttgggacctttgcaggtacgcgcattggtcttggtgcgctggccgcggcaaggcaggcccttgcgatggcggacgccacggtagcactggatctcagtcagacgcttgatgtccagcgcgacattacggcgaagatcgccttcgacgatgatgtcatgcttatcgatataatcgcggatcttggcctcatcctcagccgacagatctttgacccggatatccgggttgatcccggtgccggcgagaatctcgtcggccgtgctctgaccgataccgtaaacgtaagtcagaccaacttcgatccgcttctcgcgaggcagatcaacaccagcaatacgtgccataaagcacctccataatatacatcccatgtcctgtgtcggggcctgcgccgggaatctacgcacttggccccctagcgcgggcaattagccctggcgctgcttatgcttggggttgacgcagatgatcatcacgcggcctttgcgcttgatgaccttgcatttctcacaaatgggtttcacggaaggttttaccttcatgatgttaacctccttctaaaaacctaacaccaaagcgccttacttggagcgccaggtgatccgggccttggtcaggtcgtagggcgacatctccatcgtgaccttgtcgccgggcaggatgcggatgaaattggtccgcagcttgccggagatgtgtgcaagcaccgtgtgaccgttgggcttgccatcgttgcccatcagctcgaccttgaaaatggtattcggcattgcctcgcgtacgataccttctacttcgatgacatcttctttagacaaggtgacagcctcctcttgaaggtcctcatcagagcggatgcgccgcatcataagcggcgatcgccccgctgagcagttgatcgctttccagaagcgcgttctcaagcacggtggcagtgggggccacatgcctcatcttcttgcgtttcggccgggcaagggtgcgcagatttccgtctgcgagaagaagcatctggccttccacagccagaacggcaagggtgcgttttttgtcgcgccctgccttggagcgcaccaaacggccttttacaaagtccatccgggttcctcccagccgtgggtcaggatctccggtcccgacgccgtgatggcgatggtatgctcaaaatgagctgccagtccgccgtcacaggtcttgaccgtccatccgtccgacaaggtctttaccgcacaggctttctgattcaccatcggttcgatggcgatcgtcatgcccggcaccagacgcggcccgcggccagggttgccgaagttggggacctcagggtcctcatgcagttccttgccgacgccatggccgacaaagctccgcacgaccgaaaaaccgttttcttcgacatagctctgcacagcatgtccgatatccccgatccggttgcctgcctgcgccgcttcaatgccgcggtgcagagcttccttggtgacatccatcagccgctgtgcctctttgtccacttttccgcaggcaaaggtgcaggcgttgtcgccgttgaagccgtcgatcttgcagccggtgtcgatggaaacgatgtcaccgggacggatcttctggctgcggctggggatgccgtggatcacagtatcgttgacgctgatgcaggcggtggccggaaatccatacagatgcaggaaattgggccgtgcgccgtgccgcacgataaagtcgtaaatgatcttgtcgatctccgccgttgagataccggcctcgatcgcttcgccgcccgccttcagtgcagccgcgctgatggcacaggcacggcgcattgcttgaagttcagcggcattttttacctggatcatggatgcttacgcctccaaatggttgaggatatatgcgttggtggcctcgatgcttccctgatccgggatgtcgagcagcttgccacgggtgcgatagaactcgaccagcggttcggtctgctcgtggtaggccttgaggcggtcgcggacggtatcgggctcgtcatccttacgggtgaccaactcaccgccgcagcggtcgcacacgccttcctttgcgctgggtttgttgacgatatggtagctggcgccacattttgcgcagacgcggcggccggccatgcggcggatgatgaggtcttcatcggcaaggatgttcagagccttgtcgatctcgacgcccatggactccagggcctcggcctggacgatggtgcggggcacgccgtccagaatgaagccgtttgcacagtcgggctccgccagacgctccttgacgatgccgacgatgacatcgtcgggcaccagagcaccggcatccataaagcctttggctttcaggcccatcggggtgccttccttgacggcggcacgcaggatgttgcctgtcgaaatagcggggatattcaacttgtcacacagaatttctgcttgagtacctttgcctgcgcccggagcgcccaaaaggatcagtttcatagtagtcccctttctttcctgtcctgtcttattccaggaagcctttgtgatgacgagaggtcatatagccttccagcgaacgaccagtgtccagcgcgacgcccacaacgatcagcaggctggtaccgccaagctggatcgagacacccgtgacgttgcccagaacgatgggcagcaccgcgacgatggccaggaacagcgcaccgatcagggtgatcttgttcagcgtcttcacaatgaagtcgctggtgggcttgccgggacgaatgcccgggatggtgccgttattcttgcgcagctggttcgcgatgtcaaccggattgtactggatggcaacgtagaagtagttgaacgcaatgataagcagcagatacaccacaatgtacacccagctggtgtagttgaaggtgttgaagaaaacgtaccagaacgagccctgctccagaggcaggaatccgccgatcaggctggggatgccgcacagagtcgaagcgaaaatgatgggcataacaccagacatattgatcttgatggggatgtagctgttctggccgccgtacatcttgcggccgacaacgcgcttggcgtactggacggggatgcggcgttcggagttggtcaggatgaccacgaacaccacagccaccagggccaggatggcgatgaccggcaggtagatgtagtactggctctgaccggaagctgccagggtaagcatgctctggacggaagccaggacgtcggaccagcgggaaacgataccggcaaagatcagcagcgaaatgccgttgccgatgcccttctggtcgatctggttacccatccaggtgaccagctgagcgcccgcggtgaagcacagcacgatgacgatggcggagaagattccgctgaagccctcagtgtacttcagagcgcccatgcggcggatcacaaagtagtaaccgaccgaaaggaccagcgcgatacccgcgccgacgtagttgttgatgcggttgagcttgcggcggccctgctcgccttccttggcgagattttcgaggtaagggatcgccaccgtcagcaactggacgataatcgtcgcattgatgtagggctgcacgcccagtgcgaagatcgtgcagttggacaggttgccaccggacatcatattgaggtagttcagcatactgcctgcctcaaacatgctgtccagggcgtcagcggtgatgttcggcaccggaatggcgctgcccagacggaagaggacgaggatcagcagggtgaacagcaaacgtttgcgcagatcgtcgatcttccaggcattacgaaatgtctcgaacacctcagatcacctctgccttcccgcctgccttctcgattttttccttggcagaagccgtgtaggcggaaaccttgacgttgaccgccttggtcagctcgccgttgcccaggaccttgacaccgtccagggtcttggagatgatgcccttctcgagcagagcagcctcgtcgatggtagcgccggcctcgaacttgtcgagatcagacaccttgacgataacatacttggtcgcgaagatattgttgaaaccacgcttgggcaggcggcgctgcagcggcatctggccgccttcgaaaccggccttcttgacgccggaacgagctttctgacccttgtggccgtaaccggcggtcttgccgttgccggagcctgcgccgcggcccttgcgggtgggagcagtgtttgcgcccttggacgctttcagttcatgaagcttcatgcttgcacctccttgcgttacagcttggtcacgacgaccagatgagagatctttgcgactttgccgttagtagcggcattgtcgggctggacggtcgtgtcgccggggcgcttgaggcccaggctgtgcgcgacggcagtctgctccttaccgcggccgttcaggctcttggcaagcaggatgctcaggttcttttcagccatttcagttccctcctcagcccaggatctcggccacggtcttgccgcgcttggccgcgacgctctcggcgtcggtcaggccgcacagaccattgaaggtcgcagcagtgacgttgatcggattgttggaacgcaggctcttggtacggatgtccttgatgcccgcggcttccaggaccgcacggaccgggccgccggcgataacgccggtaccgggggcggcgggacgcatcaggacgcggcccgcgccgaagacgccgacgatctcatgggggatcgtggtgcccttcatggcgatcttgtgcatgttcttcttagcagcgctctcacccttgcggatggcctcgggaacttcgccggacttgccgacgccgtagccgatgctgcccttgccgtcgccaacgacgatcagtgcagcaaacttcataacgcggccgcccttgacagtcttggaaacgcggttgatggagacgaccttggtgatcatgccgtcatcttgttctctgtttctctgcatggccattgtatcttctcccctccttacagcttcaggccgccttcgcgggcgccctcagccagagccttaacgcggccgtgatatacgaaaccgccacggtcgtaaacgacctcggtgatgcccgcagccaggcacttttctgcgatcttgaggccaaccttgtgggcagcctcgacgtttccgccgtaatcctcaaagtccttttccatagtggaagcgctgaccagagtcttgccggccacatcgtcgatgacctgtgcgtagatgtgcttggcagagcggaaaacatccaggcgcgggcgctcagcggtgccgctgatcttgccgcgaacgcggcggtgacggcgaagacgagcttcgttcttatcagccttattgaccataatgcttctcccctcctattatttgcctttaccggctttgccttccttgcggatgacatactcgccaacatagcggatgcccttgcccttgtaaggctccggcggacgcttggagcggacttcggcagcgaactggccgacttcctgcttgttgatgccgacgatgttgaaatgcagcgcgtccttgacctcgatcttaacggtgtcggtctcgggaacgttgaccggatgagagaagcccagagtcaggacaagagtgctgccctgcttggcgcagcggtagccgacgccctggatctccatctctttggtgaagccctcagtcacgccaacgaccatgttgttgatgttggtgcgggtcaggccatggaggctgcgagcctccttctcgtcattggggcgggtaaccaaaatctcattgccctcgaccttgacggtcatgaggggatgatacttggaatgcagggtacccttggggcccttcacggtgatgctgtgctcggcctcgtcgatcttcacatcaacgcccgcgggaatgacgatgggttttcttccaattctcgacattgtcttttagcccctttcttaccacacaaaggcgagaacttcgccgccgacatgagctgcacgggcagccttatcggtcataacgcctttggaagtggagatgatagcggtgcccaggcccttcatgactttgggcatatcctcgcagttggtgtaaatgcgcaggccgggcttggaaacgcgcttcaagccggcgatgaccggagcgccattgtcctgatacttcagggtcagggtgatcataccctgcttgttgtcctcggtcactttcatacccttgatgtagccctcgtcaaccaggatctggcagatcgccttcttcaggttggaagcaggaacgtccacggaagggtgtttggcagtgctggcattgcggatgcgagtgagcaggtccgcgataggatcggtgatttgcatgccactaacctccttaggttgtgtttcttgatttggtttgttctcaggtctttcggccggggattaccaggacgccttcttgacgccggggatctcacccttgtaggccagctcgcggaagcagatacggcagatgccgtacttgcgcaggtaagcgtggggacggccgcagatcttgcagcggttgtacgcacggctggagaacttggcaggacgctgctgcttgagcttcatagaagtttttgccatttttgttcctccccttctcagttggcgaacggagcgcccagagccttcagcagctctttggcttcctcgtcggtcttggccgtggtgacgaagcagatgtccatgccgcggatcgcgtcgaccttgtcgaagtcgatctcagggaagatgatctgctctttcaggccgcaggcgtagttgccgcgtccgtcgaaggaatcgccggagatgccgcggaagtcgcggacacggggcagagccacgttgaacaggcgatcgacgaactcgtacatacggtcgccacgcagggtgaccttcgcgccgatgggcatgccctgacgcagcttgaagtttgcaacgctcttcttggccttgcagacaatggccttctgaccggtgatctggcccagatcgttgacgatggcgtcgatgatcttgacgttctctttcgcttcgccggcggcgacattgatgatgaccttgtcaagcttggggatctgcatcacgctcttgtagccgaacttcttgttcagggcgggagcgatctctttgacatactgttctttcaaacgtgccatgattcaaactccttccttacagttcagcgccgcacttgcggcagacgcggacgttcttgccgtccttgacggaatggccaacgcgggtagccttgccgcacttggggcagacgggcatgaccttgcaggcgtagatagcgccctcggccttaacgatgcctccctgctcgccctgacggcggggcttgacgtgcttggtgaccatgttcaggccctcgacaatgaccttgccctctttgggggaagtctgcaggaccttgccggtcttgcccttgtccttgccggagatgatcataacgttgtcgccggttttaacatgaagattgttcattctattaaaacctccttacagcgattcgggagccaggctcaggatcttggtgaagccggcgtcgcgcagctcgcgagcgaccggtccaaagatacgggtgcccttggggctcttgtcggccatgacgatgacggcggcgttctcatcgaaacggatgtagctgccgtcgtcacggcgcaggccgtgcttggaacggacgatgacagccttgaccacatcgccctttttgacggtgccaccgggcgcagccttcttgacgctgcagaccacgatgtcgccgatgttggcatatctcttgcgggtaccgcccagtacacggaagcacattaactccttggcaccggtattgtcggccactttgagataagtttgcatctgaaccatctttcaggtcctcctttcaaagtaccaggcttagattatttcgccttttcaatgatcttgaccaggcgccagttcacgtccttggaaagtttgcgggtctccatgatctcaacacgatcgccgacgccggcttcgttgttctcgtcatgagccttgaacttcacggtgcgcttcaggatcttcttgtagagggggtgctggacgctgtcgcggacggcgacgacgatggtcttgtccatcttgtcggaaacgacaacacccacacgggtctttctcagattgcgttccattgtttaacctccctcttaagcgttcttggcattgttttccgccatgacggtcatcacacgggcgatgtccttcttaacggtatcaatgcggacggggttatccaactggttgatggcgtgctgaaagcgcaggttgaacagttccgctttcagatccttgagcttcttgttgagctcaacgtcggtcatatcgcgcagctcgttcgctttcattcagcgtcatcctccttcacggtgtcaggctcttcacgcttgacaaatttgcagcggatcggcagcttgttggccgccaggcgcagcgactcgcgagcggtcgcttcgtcaacctccgcgatctcgaacagaacgcggcccggcttgacgacggccacccagtattccgggctgcctttaccggagcccatacgggtgccggcgggtttctcggtgacgggcttgtcggggaagatcttgatccagaccttgccgccacgcttgatataacgggtcatggcaacacgggccgcctcgatctggttggaggtgatccaggccggctccagggcgaccaggccgtactggccctggttgaccttgttgccgcgcatggccttgccggtcatgcggccgcgctgaacgcggcggtatttaacacgcttcggcagtaacattactgtttgcctccttccttcttggcagcaggcttcgcacccttcaggatctcacccttgtagatccagaccttgacgccaaccttgccgtaggtggtgttggcctcggcaaagccgtagtcgatgtcggcacgcagggtctgcagggggatggtgccctcgtgatagctctcggtgcgggcgatgtcagcgccagccagacggccggagcaggtgaccttgatgcccttggcgggaacgccgttgcggggctgcatggcgttgcggatgacctgcttcatagcacggcggaacgcgatgcggcgctccagctgagaagcgacatcctcagcaaccagctgagcattggtggtgacgcccttgacctcgacgatgttgaggttgacgttcttgccggtcatcttggcgagctgagcctcgagcttggtgctctcagcgccgcccttgccgatgacgatgcccggcttggagcagaagacgctgaccttgatgcggggcgcgccggactggctgtcaacggtacgctcgatctcgatcttgggaacgccggcagcgtagagctgcttcttcaggatcttgcggatcttgtaatcctcgaccagggtgtcgccgaattcctgcttagaggtaaaccagcggctgtcccaatctttgatgacacccacgcgcatgccgtggggattgactttctggcccatttgtttacctccttactctttctctttgaggacgacggtcatgtggctggtcctcttgaggatacggaacgcacggccctgtgcgcggggcatgatacgcttgagcgtggggccggggcagacatagcactctgccacatacaggttgttgcgatccatgttgaagttgttttccgcattcgcggcagcagaattcaccagcttgagaaggggctcacaggcggccttcggggtgtactgcaggatagccagcgcttcgtccaggggcttgttacggatgagatccatcacgatagaaaccttgcgaggactgatgcgggcgtaacggagaattgcccgagcttccatttataagttcctcctctcttacttaccggtggtcttgccgccggtatggccggtgaacttgcgggtgggagcaaactcaccgagcttgtgaccaaccatatcctcggtcacgtacacaggcacgtgcttgcggccgtcatgcacagcaaaggtgtggccgacaaaatcggggaagatggtggaggaacggctccaggtcttgataacgctctttttgccgctctcgttcatagcttcgactttcttcagcagagaaggcaggacgtaagggccctttttcgtgcttctggacatatttcgtttcctcccttaaccgttggcgcgcttgacgatgaacttgtcggagcgggcatgatgtttgcgggtcttgaggcccagagccggcttgccccacggggtacgcgggctgctgtggccgacaggtgcgcggccctcgccgccgccgtgcgggtgatcgcaggggttcatgacggtgccgcggctgcccgggcgaacgcccatgtgacgcttgcggccggccttgcccaggttgacgttctcatggtcaacgttggaaacgacgccgatggtggcgatgcagttcagacgaacgttgcgcatctcaccggaaggcagacgaaccagagcgtagccgttctccttcgccatcagctgagccatgacgccagcggaacggaccagctggccgcccttgccggggtagagctcaatgttgtggatcatggtaccaacggggatgttctcgaagggcagagcgttgccgggcttgatgtccgcgttggggccagccataacggtgtcgccgaccttcaggccgtcgggagccaggatgtagctcttgacgccgtcggtgtactcgaccagagcgatgaaagcagaacggttgggatcgtactccagggtcttgacggtcgcggggacgtcaaacttgttgcgcttgaagtcgatcacacggtacttggtgcggttgccgccgccgtgatgacggacggtgatgcggccggtgttgttacggccggaatgcttcttcataggctccagcaggctgcgctcgggctcgaccttggacagcacgctgtaatcggtgacagtcatgccacggcggcccggggtagtcggcttgtactttttgatagccatcgtgttactcctttgtttatcttatgaattattctcggggtcatatccccataggcgaaccctcggcgggttcttgacggaatgctcagcaggatcaggtcatgctggtgaagaactcgatctccttggagtcgggggtcagcgtgacgattgccttcttgctggcggcggtgtaaccgccgtgcattccctgacggcgccaacggccacgaacgttcatggtgttgactttggcgaccttaacgccgaacagttcctcgaccgcctgagcgatctcgaccttggtggcgtcggtagcgaccttgaaggtgtacttcttgtcagcgataccggccatggagttctcggtgatgacgggcgcgagaacgatatcctgtgcaaatttcatcagcccagtacctcctcaagtttcttggcggcttccaggctgatgatcatcttgtcggcgttgacaacgtcgtaggtgttcacgctggaagcggtggtggttttcacgcccgggatgttggcggcgctcttgacgaacttggtgtcgacaacgtcgttgacgatcaggttcttcttgccggcgccgacagcagcgagcatggcaacaacggccttggtcttgtattcctcagaagccatcttgtcgacaacgatcatgttgccggaaacagccttgtcggacagagcggagagaaccgccagacgcttgaccttcttgttgatgcggtagctgtagtcgcggggcttggggcccagggcgacaccgccgtgcgtccactggggagcgcggatggagccctgacgagcgtggccggtgcccttctggcgccaaggctttttgccgccgccgcggacttccttgcggatcttggtgttctgagtgccctggcgctggttggccaggaagttgacgactgcctcgtggacagccttctcgttcggcgtaatgccgaagacggcatcggaaagctcaacggtggaaaccttcttgccgttcatatcgacgacatcaaactgtgccattgtgttttcctcctttacgctttcacgctgtcgtggatggtcacgaccgagcccttcgcgcccgggatcgcacccttgatggcgatcagattgttctcggcgtcaaccttgacgacgatgaggttctgcacggtgacacgctcggcgcccatgtggccaggcagtttcttgcccttgaagacacgggacggagtcgaggtggaaccgttggaaccggcatgacgggaaacggggccggtgccgtggctctcgcgcaggcgatgctggccgaagcgcttgataacgccctggtagcccttgcccttgctgatgccgacgacgtcaacgtggtcgccctcagcaaagatgtcagccttcaggatgtcgccgacgttcacgccggagatgtccgccaggcggaactcgcgcagggtgcgcttgggggcaacgtcagccttgtcgaagtgacccttggcggccttgttgaccttcttggcggaaacttcgccgtagccgagctgaacagcctggtagccgtcagactcttcggtcttcttctgcacgacggtgcaggggccggcctcgatgacggtcacgggaacgaccttgccgttggcgtcgaacagctgggtcatgcccagtttcttgccgatgatacctttttgcattgtgtaaatcctcccttaaaggttattggttggtggggtggcccatcaacatgacctctccgcagcgcttggcattttgccaggccgctgttgctctgtgtaccttacctgccggcggtcagcggaacacggccgctcggaccggcttgtttttataaggtagtcagtgcatcacagcttgatctcgatgtcaacgccggcggggagctgcaggctcatgagagcctcgaccgtcttgttggacggcttcagaatgtcgatcagacgcttgtgggtgcgggactcgaactgctcacggctgtccttgtacttgtggacggcacgcaggatcgtgaccacttccttgtcggtgggcagggggatcgggccggacacgcgggcgccggtgcgcttcgcggtttccacgatcttggccgcagccgcatcgatcagggatgcatcgtagctcttcagacggattctgattttttctttgactgccattgtcttcgcctcctgaatgaatttgttgccttaggcgagccgataaatcacacacgcttccgggtgttcaacccctttgcatgagaaaaaccggtgaaccgcacacgcagttcccccggaaagaatccctcgcaaagtcgattggacattggtccgtgccgcagaatgcagcgccgtacgtatcccttcgcattcgtaattctttcgcccggttctaagatcggacatactccgcggaaaaacccgtgctcatcgcacggcaacctcccgcatcaacgcatatcgtggcttgtgttgaacggatgttcttcacaagccgttcgcagccgagaattataataccacacgctgcccggtgttgcaagcccttttttcgcattttaccaaatttttttcaaaaaatttggtgtatgccacccttgacacggaactttccaccagttccgggcgatttgttcaaaattcgcccgatttttccatttttcggcaggcagacggtattttttcagctttctcaagccgagggctatcatatcacacctttctcaaaaagaaaagccccgccgggaaatttttcccggcagagctttgcctgattcctttcctccgttggctgcagtctgtggcaggcgccagacagccggaatcctttgccgttcaggcaggcagttcactctgatgccagccggtggcgtccttgatccacagggtcgtgccgtcccaggccacgccgggatgctcacaggggatgacctcgtctcccaccgaattgatcagtccccactgatccccccggcgtactgccacatagccgttcaggagaggagcggcgtaggcgggttccgctgtccagtcccaggtggtataatcgcgcaccgaatcgcaggtggcgtcgtagaccgcttcggtaacccggctggccgtccggtcaatatagccccacttgccgttggtatcctggatgggggccagctgttcgtcaaagaagaagccgcccagctgaatgttggcgcttcccatcctgttgcccgccttgtcgacatagaaatagatttcctgattgccgtcccccagatccgacacaatggggttggagggataggtcgggtcgccctcctccccctcctcgttggcatcgtagcagggcagcggatcgccgtaggtctcccacatctcgtcggtgatctcaacaatgtcgccggggccgtcggaggaagtataggccctgagcgctccggggtcataagcgtgaatgtcccgcccgggagcatccaggtcatagaagaaggtgatcatgccggcaccgtgtccagggcagataatgggctctccctccgcttccagttcggcggaaatggcatccagctcctcccagcccatgccggaaacgctccacgtccaatgtccctcattgttgcaccggcccaccggaacatcggcacggcagggcagcacctccgtaccgtcggcgcggatgagtccccacttgccgtccttggagacggtgaaatacccttcctgcacgctgctgggagtgctgtcccccaccgccacattgcgcatttcatcatagtccagcccgggctctcccgccgggttgggttctgcttcgggtgcaggggtgggttcgcccgcctccgactgggaggacggcggctggggcgtgggcgttgcggcaggcgttgtcatccggggcgcacagcctgccagcagggcggccgccatcagggcagcggcggctcttgtgtacttcttcatagagggtccctccttcttctcttttatacttatattatatataggtgtttacacggccagggaggcctccgacacccgccagccgtcgtcggtctgtaccagtcggatggtatgccataccgcccgggcagggggcacccctacgccggcggcctcggcagactcgatgcccagcaggccgaacaccaaactgccgtcgggctgggtctggggctcggtgcagagttgagccagtatcagaggattggtcccccgctctccaccgccgaagcggagctcgtccttttctccggccatgtagccggtatagtatccgtactgtgcattgtagccgccgcttgcatattgtgcggccagtttgggtgtgaataccgattccagataggctttcagttcgctgtacctggtgaaacgggcgccgtccacggcctgatacagctcggcgtttttgtcgttttccaccggttgtgccggggcatagcccagccggacgttatagtgccacaggaagtccagggcctccgccgtagcgatgcttgcctgttcgtccagggatgccggaacatagtagctgcggctgccctggtaatcctcccacggggtgttgataaggacgacgcgctgcagactgtcgggcagagtatactcggtgtccaccagcagatcataggccaggaaagttccatcctcgtccggctggacctccgggttgagggattgcagctcggacacctccatgcccagcgcatccgcggcctgctgccaggtcacacgctccccaagatctacctgcaggggaaggctttcgggcaggtcggtcccatccggcaggcggactttggtctcccacatggagtagtcggccactttgctgccgcctgcccagtcggcgcacagaatggcccagctgccgtcttcattctgccgcagggtgtaggccaccgactgatagggctccatccacaggctgtttgctccccgggccatggtcagcgtccaggtcccggcggaggtgttttctgtaaagtcgatcatccggcagttgcggttgccgtcccccgggctggctgccaacgagaaggtatccgcctcctcgtcatacacactgccccagccctcctgggtgaacgcggactcgtaagggtcttcaaaggcgtacagctccgttccaaaggcatcccgcacctgggccgccagatcggaggccttccagctgccggtgttgtctgtctccgtgccgcgcagggtggcaaaggctgcggcgtagtaggcggttgtgaggggcggcagatcattggcatccgcccagggctgcgtggtgacccagctgcggaaagaccggacgtacgtgagcgcctccccttcctgcgtgcggtagttttgccgggggatcatggcggagacacagcccgatgtgacatagtaaccgttgccgaactccagggcataggtggtctcccccaccggcagcggcgtcctgcccgaatctgccaccgagatggtcaaccacaggggttcgtccgtcccgcctgagaaggagaatccgttgaccaccaggccgtccagcgactcaaagggaaaaacatcatccactgtggtttgtttttcctccgcataggacaggtcggtatatccgcaggccgcggctgcggacgccgcgtcgttatgatagagtgccgccgccagcgcataagcattttgcaggcaggtggcctcatcggtgcccatgctttcccaggcgctgtccgggtatcctacgccggtgacgtcggccatggcctggccgtaatcggggcagggaccgcgagtcgccgcaggtgccggttgagattgggatgttgttccggtggtcggggagtccggcgtgacaccctcctctctcttttgcgccgaggcgcagccgctcactgccgcggccagcatcgccgccgccagaaaagcagacagcagtcgtacatatcgtgccacaggtccacaccttctttcttcatccgtcagggagaacaggtcccgttggtatttgccgtcacagggaaaccgggcggcgggagcctgcttttgcagagagaagcggcagaatttctgccgtttttcccactctttctacgcacattatagcataggaaaggcacaaaaaaaggccccggcaggccttgccggaaccttttacagtacagacacagttcggacgaatttggtgcctttacagggccgcgaagcgacgctcccctgccgttgccagccatcggaccagcagcaggcagaccgccgcaaggatcacaccgcacacgatcaggtaggcttccactgtgagcagcgaggccagcgccatgtagagcagaattcccacaccggccagccccatgccgccgaaaattcccaagaacgccgccatggactgcttgaccaccatggtgtcattgggggcatccagtttggggaacagcaggttgaccgccacccccgccagagacaccgctcccgaaagccctgcgctgacgaacagcagcgccgccccctgcagtgccgtaaagcccattgcccactgcaaaagcaggatacataccgccgtgagcggccaccccaccagcacattgaaccaggccttgacatacaaaatcgttttaccgggcagcggcagggacttgagcagccagagacaccggccttccaggctgatggaaacgctggaggtggacaccgtggccagcatcaggcagaccgcggcagccaccacgccatagcagtcggtgggagtcacggcaaggcccatctcctgctcaaacagggcgagcagtgcatcccggcgcacgcaggccgccaccgcccctaccgcaagcatgaccagcccaaaactggtattgaacaggtagatggtcgacccgaagtaacgggcggcctcctttttcagcagggccgtcacaggcgcaccgccccgctgggtcaccatgcggaacttgctccgtgttgcccgggcgttcatacgggagagcagcctgcggtaggaccggcagagcagtgccgtcaccgccaggaagggcaggatgcagaccagtgccagaagtaccagtgccacaaggttcccggtacaggcatcgcccatcaggccaaagaggaacagcgggccgtggagtgcggcgtcaatatcctgccgcatatcccctacgctctgaaacagatttcccatccggaaagacccaaccaggatcagcataataaaaatcaggtagcccaggctggcaaagagagagctgtgccgcacccgggaagaaagccaggtcaccgcaaagcccaccagcacccccagcagtgtgggcggcagtgcgcccaggacggaaaccggcaccgccagcaccaccgcagcggctcccgccgggccgccgttgaacagatagaccagcgccataggcagcaggaccagggcggtaatgaacaggttttccaggtagactgccaggacccggcagagcagcaccgcgtagtcgctgacgggcagcgataggataatgtcgttgtccttgccgccgaacagcattccgcccgccgcaaagaccgtcagcagaaaggccatgagcacagccagcaccgacatcatgccgggcagcagatccagggcgtcgaacagtttcagtcccacggcaagggaggcactgtatgtgaaggagagcatcaggcagaggaacgccacaagggcaagcgccgcccccgccgatactgcctgccggcggctgcccctgcccgctacggcgttgagcatttccagcaggctgagtttgaccagtgctgcaaaggctttcattgtgcggcctcctcccgttccagctgcaaaaagacttcctccagattggaacgcccgacgatctccgtcgtggggcctgcttcgatcaggcgtcctgcccgcaggatggccagcttatcgcacagcttttccgccacttccagtacgtgggtggagaaaaacaccgccccgccctcgtcgcacagttcccgcagcatggtctttaaggtataggctgcggtggggtccagaccgacgaagggttcgtccagaataagcagcctgggctggcggatgaaggccgagatcagggccagcttctgcttcatgccgtggctgtacccgccgatggccccgcccaggtctttcgtcagttcaaaggcgtcggcatagcgggcgatgcgtgcagtgcgttcctccgaggagatgccgtatacatccgcgatgaagttgaggtaacggatgccggtcatgaaatcatagaggtcggggttatcgggcaaaaaggccatgatgcgcttggcctccaccggctcggtgcggatggaatggccccccaccgtgatctccccctcggtaaaatccagcactccggcaaccgcccgcaaggtggtggatttgcctgcgccgttgtggccaagaaagccgtagatctcccccggcgccacatggagggtcaggtcacgcaccgcatagcggcccgcaccgtagcttttggaaaaaccgtcgatcctgagcataaaaatatgcctcctttcgtgcgccgcaaagcgcactgtctggcccgaaacaggagttcgccggggcatttcccctgcagcaccttctcaaaaacgaagtggcaaatccaaggcatggtttggcttaccgtaaaggaaagtcactgtttccattgtttctctccgcttacccggccctgaacgtttttgtgaaatgcgggcatatatcccttttgccggtcatgcagataaagacaaggtgcctttgtgtttgctccgccgattcgggcagattccgtcaacatttagatgttcttctaaatgttaactcatatatacaccagcctcggaactttgtcaagtatttatcaaaagtttttgcgtgcggtctatacaaaaagccacaggggcgtttttgctcctgtggcttggcgcggggacacggcttatggagcgtgcctcagcgcttggcattctgtttcagctgttcttccaggccggggcgcggcgtgacatagacggtggtgtacacctcatacaagaccatgccgggcttggcgccgttagctttccagatgttcttgacctcggtggtatccaccgccaccttggccccgccgttctggctggaatgcagcactgccagctcggcggcctcctgacgggtagtgtcggggatatccttgccctcgctcatcacgacggtatggctaccgggggctttctggacatggaaccacagatccttgccccgggcagtgtgcagagtcaggcggtcgttctgggcattgttgcgccccaccaggatctcaaacccgtcgctggaacgatagcgcaggaaatccgcaggtttctgctttttgtcccgctgcttatagtatttgagatacccctgactcttgagctcggcacggatctcacccagggccgcctcaccgggtgcgctctccacctcatacaggacggtgcccagatattcgatctcggcctccccttccaccagcagctttttgagcatctcgccggcggtctgctttttcttgtaatcgcggaagtatttctgggcgttctcgttggggcccaggcgcgggtccagagggatggtcacatcctcgccggtatagtaattctgtaccgtgacctgacggtcgcctttctggatggcccagaggttcgcctgcagcagctcgccatacaggcgcagccgttcggccttggtgctttgggccagttcctcccgtcgggcggcctgcttgcgcaccgcgcgctcgtgcatattgtggaccgccttgtacagttcccggcttttctggcgcagtcgctcggcgcggtccttggtggcgtagtagtcctccagcatttcgctgtaactggggtaggtcgtcacctttgccccggggccgtactggccgggggcaaaaaagctgaactccaccggcttttccccgccgtccgactggggcaggcgcaccgcagcgggaacgccgcctgcggcatggcgggtgcgcagttcatcaaaggccttggcaagggcttctttctgctgctcatccagctcgtcggccagcagagaggtctcgccgccgaaagccatccaggcagcttcccgcatgaccaccgggccgacgccgcccaccgtgcgggtgagggcgtctgcgggagggaggtccttccggcaggcttcggccaccgcctgggcgccggatacctgcaaaaagtccggcttggacggtttgggcggcagggtgtaaggcaggccgggcagcagctggcggatggcactgtcctcaaaatctacccgcttgagggcgtcgatgatgcggccatcctggaccagcaccaggttggagtaacggcccatgagttcggcggccagggtattcaccaccaggtcgcccatctcattggtgcagcggaaatcgaaaaagacgatgcggtcccccggttccatgtgcaccgagatcagccgtccgccggtcaggtgcttgcgcagcagcatacagaatcccggcggggtggcagggttttcaaagctctcctgcgtcaggcagacacgggcagaaccgctgcgcgccgacaacagcagccggtatgtatcggtgcgggtgcggagcagcagcagtacttcatcccgcgtgggctcaaaaatcttgtcaatgcgcgcttccagcagccggtctttcagctcggctgtcacaagtgccagcgttgcggcgtcaagcgccatggtcttttccctcctcctgcgggcggcaggttcacagccaccctgtcaaaatcatatggtttccccaatcagagataggcaaacgggtcctggtccgcccgggacacggtcacgggaatatccgggaacgcctcgctcaggcgcttggcaagcactgccgcaatagggcgctcagtggcccagtggcccgccgctacaaggcccatgccccgctgtttggcgtcgcaggccacgtggtggttggcctcgccggtgagcaggcagtctgcccccagttccagggcttccttccagtagctgccgccggcgccgctgacttccgccaggcgcaggacgggatagtccgcctccacatagcgcacgccggggccgagggtatcccggcacagttccgccagcgcctttgcgctggtagcgttcaccgtaccgatgcggccgcagccgtcggcaaagggaatggtatcccgcatgcccagcagttcggccagggtatcgttgacaccgccgggagcggcatccagattggtgtgcatacaaatggcagagactccgcccgccagcagcagagccggaagatcctgcgccgtgacccgcttgatgggatcaaaaatcaccgggtggtgggagacaatcaatgtgcagccttgcttcaccgcttcttccaccacgggggcggtgatatccagtgtggtcaggatggcgtccaccgggcggccggcgtccaccagcaggcccacgttatcccaggattccgccagttccggcggggcgatgcggcgcatctcctccaggacctgttgtaccgtaatgctcataggttgccctccaatcgttcgatcagtgcatccaccgcctgagcttcggggccgggggcaaggcccagacggtattttttcagtttgggccgctgctgtgcgcagtaggacgcgaaccccggctggcccggcgttttgccggtcaggcagtgccaggcgtcgggggtgtggcggtcaccgtcaaagcgggcgttcatcaccgcgtaccaccgcccggcagcgtaggccagggtctcgtccagcagggtaaagccccgccgggccagtcccagccgcagcaggctgtgcttggtggcaggcaccagcaccaggttataccgctcgtccgccacccagggagcggcgtccagaatttccaggatcgtctcggcgcccatgccggcaatgatgatgtcgtcggcttcctccggctgcaggacttccagcccgctgcccaggcggcaatccacccggtctttccagggtacgcagcggcggcgggctttttccaagggatcggggcgaagatcgcatgcaaaaacacgcgggcagcgtccgctgcccgcgagccacgcactcaatttgccgtgatcgcagccgatgtcagccgccgggtgtccggcccggacgtaggcggccgcagccgaaagcctggcatccagcacaggcagccggggctcactgctttttggcaaagtagtcattgagctgtgcgatcagagcgtcggcgtccacgccatgaacggcgcaggcttcctcaacggtctcgccgtgggcggccatgcagcccaggcagtgcatgccggtggccaggaagatggggacgcagccctgctcggggtcgttctgaaggatctgggcgatgatggtatctctctgaacagtcatggttacatattcctttctctgtgaaaaacattttatatgacagcctgccaggatgcgtagagagcgtatccctgcaggatgacaagcgatgtgaggcaggcgacggcaaacaccgcgccgcggcccaggctgcgccgggtacagaagtttttattggagtgtaccagcaccagggccaaaggcagcaccggcagccagtaacgtccctgcaccccgaaaatggtggtgtagttgatgggcgtccagctcagcgccgcaaagaaggtcaggcccaccacgcacagggcgatcaggccggtccatacccgggtgcggggggcgaggcgggcggactcgtcgtcagccacaggcagcgacgccgcagccaatgtccccagcagtccgatgccgagaagccagctgacctcgatgcggtaaacgatgggttcgcccagcacggtcccaagaattccctggagccagagggctccctgctccgacactgagcgcagcagcagcttgacggttgccgggacattacggcagatataccccgccgagaaggtgtagatggagtcgccgttttcctgaatgctgttgaccagctgctccggtgtaagaccgccccacatatgggtcaggcgatagaggaccaccggcaccacagccagcacacacagccccagcaccacgaaaaagacacgctttgcgcgggggcgctgccttacgttccagtatacgatgcccagcaggacagcggctgttgccagagcaacagcaccccgggtcaggcccacattgtccacgtcgcgggtggcgtatagcaaagcgcccaggtttgcctgtacccagaacagcagggccaggaccagagccaggcccttgaccaacgtgccggggcgggtctgaatgcccttggctccgccgatgcggagggtttgctccggttttccggcgcgccagttgaggttttgtgccgggatgatcaggcagagcagcaccacgggaagatagatcgctttcgccgggccgatgcaggccgccaggaccagcagcgcggccagccttgccgggttggcaggctgccggcgcagggcaaagcagagagccgtataggcaaaggccatgcccagcaccagagcatcggcggaaaggctgcccgccagctgcagcgacatgggcagcagagcaaccgccgcaaacagccagcgctgattgggcgccgccaggcggacacccagcgccgccagcagcaggtacaaaatcaggttacccagccgccccagaagcagcatggcaaaaaagctgagtcccagcgcccgggccagggcaatccctgccgtctggcccagatacaggtaccagatgcggccggtgctgtccactgagatgtcggtggcagtgtccgaactgccaccgcccggtgccgtgaggttttcccccatggtcttataggcaaaaatgccgatctcaccggtctggctttcaaaatagggttcgtcgcaggcgcggaccagcagcgtgccgtcctccgcccggaccggctggcccagcagatcactggcatactggtaagccacagccaggtgggtgtattcgtcgggggcgaccagcggcggcgttaccaccgcaaaggcagtgcccagcagcccgccgcagatcagcacggccagagcggggcgggctttgcggccgaacagcagccagaaccccaccgccactgccgcaaagatcagcacggcggggatcataaggattttgcccgaccagctgccggaataatccaccacatactgcaaagccgccgtagcgttcagagagccgtccggcccggagagagccatctcccccacctgagcctcgctggcccagatgccgatgggatactcggattccccttccccgatgccgtccacccacaggcggatggtcaggttctcgtcgcccgccgccgtataggcggcgtcaaaaatcaccgtttcaaaggtattgtcccgcagctcaatgcagggcagcgtaccggacgccagcgtaccgccgtccgccgcgcacagctccgcgtgtagtgtgccggtggcaaacgcatggtcataagtggcaatgttgagccgcacaccgtagatcctttgcccggcggaaagccggatctgctgggtcagggcgtcctcccccgcatcagcggaaaccggaagttcgatcttttgggagtaatcgtcgttgacgatctcatacaccggctggccgtccaccgtgtcggccaggtcatatcggacccaggccagcgccaaggcgcagacgaccagtaccgttgcccaggcgaaccagaggcggcgccggtacaaaaagtctttgattttttccattctgccgctcctttcggtggcgctgcaatacagaatttatgataccacagccccggcaaaatcgcaaccgggcgcagggtttgttgcagtcccgagatcggatgacgattttgaccaccgtcacaagcgccagaaagccgtgttttgccgggcagagcattatcatcgatgcaccgaacagccgttgacttcttccggtgtcactggtatcctcattataaaaggaagcgcgggccgtcccgattttcggaggtgtcacatgaaaaagctgaggaccattcaaatcattgcggcaatcctgtttttgatttccctgttctgcaccgtggatttaggcctgaatgttcttttcaatgcggaaccggtcatccacgatggcagtctctccgcccgcagcattctccacgccgtatttggcatcttcagggacagtctgtggtctttcgacaggttcttctctgccttcagcacttcggtttggatcacatatgcgcttctggcagcaaatgtggtcttgcacttctgcaagggcaaaaaataaggtacatttccattggaaccaagtccaaacaagtgtgtggaacatacgaaaaacaccctcaaaacaaatgtcttgagggtgtttttgattttggtgagggtacgttggcggaaaggcatttgccgcccgccatagatccgggccatcatctgaagtgccgggcggttgctgacgcccccgtccggcagggcgttcagctgtttttgcgatacagataccaggtaatgctgccctcgccgccgtcgtactccacctgtgccgtcagcgtatagtcaaagcgttctgccagggacgggtccagggagacggcaaagtccaccccgccggattccatcagggcgttctgctgctcctgctgttcgggcatgggcaggttggtcacgcagaaaaaccggcagggcggctgcacgcctgtcacggtatagaaaccgccgtccagtgtgccgtaattgagcagcgtcccgccgccgttctgctccataatggatgcaaactgatactggggcagttcttccgccgggcgaaggagctgccccgcgttatggcaggtcagcaggcagaaggccagcgcggccgccgctcctgcggcgggcagcaagttccggaaagttttgacggccgcgggcagtttccgggctgccagagcaaggggcgcaatacccagcgccgcaaacaccccgaaaggcagaaagtaatagacatggtaagcgccgcgggcaaagccggtgacagccagccccacggccaggactgccaccgagaccacgcaggcaaagcggcggcgcagcagcatccagagaattcccaacgcagccagaacggcaaacaatggggtatcgtgacagccccaataggtcttttgcacgatggcaaacagagtggcggcaaaaccggtgtccccctggccgcccccgctgtaaaggaagagattatccccgaaataggtaccgaagaaatctcccagagcaccgtttacgccaaagtaaacgagccagggcaatgtggaaaaagccatgccgcccaggtaggcggcgcagctcatgcccagctgccgcagccagcccgcccgcagatagaataccgccagaaccagcacccatcccaggaaaaagcccatcatggtgaacttgacccacagcacgcatcctgcaccgaaccccagcgccgcaacacgccccagggataccgggcggcggtctgccggggtctgcaaggcaaagtgcaggacctcatacaaggcccaggccaggaaaggcaggcaaagctcctcggcgctgccgccatgggcaaaggcctggcctgccgctaccggtgcccctgccacaagcacccaggccgggtgcagcggcccggcaaacagttccgccgtgcgcagcgaccagtagagaaaggccgcgaaggctgcgatctcaaacagaaaaacaccgaaaaatccggtgtgatccacacaccagcccaggccgtagatcaggtagagcagcgggcccttgtggtcgaagacatcccggtaaagcacactgccgttcatcatggccttgcccatggtatagaagatgttggcgtccatccagtcgttgagagggtacaagggcgacgacttggagcagaccgccagcagcaggaccgccgcgcccaggcaccataggatccgtttgacggccggtatttttacaggttgcattccgtttcctccctgtgcatcaaaagggcgcgctgccccgggcatcatgcccaaagggaagcgcgcccttcctgttgcaaaacctgtggcttgccgatacagtcagaaattagttctggcgcatcttggcgaagcactcgctgcagtagaccggacggtcctcacgcggctggaaaggaaccttgcactccttgccgcagctggcgcagacagcgtcgaacatctggcgctcaccgcgggtagcgttcttgcgggcatcgcggcagggcttgcagcgctggggctggttctcgaaaccacggctggcgtagaactcctgctcgccggcggtccagacgaactccttgccgcaatccttgcatactaaagtcttgtcttcgaacatagtgggtatctcctctttgtttagttttgcccgcggaaggatttcaaccgacacctttggttaaggaccaacgctctgaatgttaagctactgggggcatatattgcctggcctttcagccgggttccaaaataagttcacggcgcaccgcgcagtttgcgtcgggcgcgtgccagggcgttttccaccgccttgggttcccgcccgagcagttgggcggtgcgggcgaccgaacagccgtccatggcatattccagcacactgcgctccagcggagacagctgcgtctccatccggtgcatcacgtcgtcgaaggcctcacccgcaatggcaagttcctccggtccgggcgtggcggagtcttccggcagcggcacgctggtgttgagaggcgaatgctttttgcgcaaggccgcgcggcaggcgtcctgctgtgcgtgggtgatgcaggccgaggcataggcggcaaagccggtcccctggccgggatcgtagctgcgcacggcgtcgaataggccgatcaggccttcctgcaccgcgtcctcaaagtcgagaccgggtacggcgcatcccgccgcgcccctgcggatggcgggcatcatgcgggcgatcagggcggccagcgcggtttcatctccggtctttgccttttcgatcagcgcggggtccaaatgctgcattgccatgcctcctgccgggcatccacgaatgtaatcattctaccgtttgaagaaagatttgtcaacaaatttttatggtcgaaagcccttgtttcggccatttttcacaacaagaatcaaaaaagcggcgtgtccgcctctcccatggagacagacacgccgcctggcctgctgtcaggccgccgacagtgcagaattcactgctttttagaatcgttggaaaacagctggttgaacagatacaccagcgcgatcagaatgagggtgacaacaaacacacccatccagccctgcaaagccttggccaggaccggcagaaacgtatccatattgaacatagcgtacccctttctcggctcagccgaacagcgacaggatcatgccgccggcaatgacggaagcgatctgacccgaaacattgacgcccaccgcgtgcatgagcaggaagttctggttgtcctctttcaggcccatctggttgatgacacgggcagacatggggaaggcggaaataccggccgcaccgatcatggggttgatcttttccttgctgaagatattgtacagcttggcaatgaaaacgccgcccacggtgtcgaagatgaaagcgatgaggcccaggcagaggatcatcagcgtctgggcgttgaggaagctctccgcctgcatcttggtggccacggtcaggcccaggaacagggtgatcaggttggccaggactttctgtgccgtctcggacaggccgtccaggacgccgcactcacggatcaggttgccgaacatcaggaagccgatgagggcaacgctgcgggaagcaaagatgcccgcgaccatggtgatgaagatggggaacaggatcttggtggtcttggaaacgctcttttccgcgtacttcatgcggatctggcgctcctttttggaagtgaccatgcggatgaccggcggctggatgatgggcaccagcgccatataggagtaagccaccacgatgatcgcgccgatatactgggtctgcatatagttaccgacgaaaatggtggtggggccgtccgccgcgccgatgatggcaatggaggccgcgtcccggatgtcaaagccgagcagcgtggccaggcagagggtgaagaagatgccgaactgtgccgccgcaccgaagatcatcagcttggggttggacagaagcggcgtaaagtcgatcatggcgccgatgcccacgaacagcagcagcgggaacagctcgttggcaatgcccgcgtcaaacagcacgtccaggataccgacctcggtcacgccgtcgatgatctgggtcaccgcgccggacagcggcaggttgaccaggatggtgccgaagccgatgggcagcagcagcgagggttccatctgctttttgatggccagatagatcagcagggcgccaattgcccacatgacgatctgctgccactggatattgagcagatttccgaataaagcctccatagaaaaactcctctcacacaattcccggcgggaaagcaccaaccccacccgaaagcaaaagctcagaatgcaagttccccgcagtgcggccgatgccgccccgcgggcaggattctgcccttttgttttccgatgaagccatgccccgcgccggagataatttcctccgccgggcagacggatggttcaccttcgtccgggaagtatccgggcacaaaaaaagacttttgccaacacccgcttttcggcggacatatggcaaaagtcttgctttttgatccggttgcgggcggttgccgtcttgacgcagaccgttacggcaggttgccgcaagctactccctttcgcaccttctattatggcggagagtccggtcttttgtcaaggacaatcgagggattttttcccttagctttgcacgtggacgcgtccgctatactgccagtatccggtcaggtcggttgcggtgaattccgccgcccagttgcccatgggttcctgggtaaaccgggcggtccagccgtcctcggtatgagtcaggctgtccaggcggtagatccagtagacctcctccagttcggcatcggtccagggcatattgacgggggtccagctctgccccgcatcggtggatacgtagacctccggccagttgtcctccgtccgggtctccagggagatcatgagggtaccatcctcggtgatgtccgcgccgcagatgctgcgctccccgggcagggtatccgacacattatcccatgtctggccgccgtcctgcgtcagtgccagagcacgccagcagccgctgcccatggtccagttgccgcccgcggctgcaaggcccattccgccgggcagcagccgggcaacgcgacggtccagcgtggcgtcctcggtgctgcccaggttcatctgggaccaggtcccgccgtcatccatgctgtacaccagggtcgcatcgttgccgcccagcaaaaaggccaccgggccgccttcctcctccgaaatggaccagctggatcttgtgatgtcggtatagtcgtccaggcagtcctgcgccagctgggaatactgggaaggcagcgccttccaggtctcgccccagtcacgggtgtagcgcaggccggtgtcggcaaccatgacatccgtcctggtatagcttgccgggttgccgatccactgttccggcacggccggctcgtagcagaagctgagccgctgatcccaatcctccggcacttccaccacgagcgtccactgaggtccgccgtccgctgtgccgtaggcgcccaccgccgcctgggacatatccagctgctgcggcgggttgcgcatatccaccatggtctcccctgccaggggccgggagaatgccgtgaaccggacggtaaagccgtcaggcatgatggttttgatcgcctccaccggcaaggccgccaggttggtattgaggaaatccgccgagaggttttcattgtaaccgccggtgggatcgttgctatataacgttcccgtggtgtaataggtaaggatctgggtctcgtacgcccaccggacagtaaagccgccgttaaagccgggttccgtgccaaggtactgggtgacctgcaggcttacttccaccacattgccttccgggtccacgttcagctggacttgatccacattgaaccgggaatccaacagattgcccagacgccggtccacttcttccaggatgggagccacgccctgggacagcggatagggttccagctcaaacacgttgtccccttccatcagatagtccgtggaggtgttgacgctgtcctctccccagtccgtgtcatagccgccacccaaattttcctgcagcaggttcacggtatcaaaaatcgtccaggtcatcaggcggccgcatcccgcaagaaggcctgcgcaaagcagagccgcggccgcccggtaccagatccgtttcatgctgttccctccctttcttttttccatcatagcgcggcatttccggtttgtccagcttttgcggccgctgtttcaggacagcagcccggcgcgcagaaaaattcttttccggtacgctgtcccgtgaagcagattacgtcccatcctggcaaatgacgattttttgaccgcgacacgcatacacatgaatttctttcacttgacgaatcaacgcatttcaactataatcaacaccatagcttcaacggcgaagcttctctgccccgccgcgtgcggggatttttgttgcccgtacccccttgggacggtgagatgctctgccgatcatcttgccgccggcaggcggccacaggaggttcccatgctgacactggacaaaatctaccacgctgcattcatcctgaaggatgtcgcccgccgcaccgacctgatcgccgccccccgtctgagcgagaccagcgacctgtacctcaaaaccgaaaacctgcaggtcaccggcagtttcaaggtgcggggcgcctactataaaatcagccagctttccgaagccgagcgcgccaagggcgtcatcgcctgcagcgcgggcaaccacgcacagggcgttgccctggccgccacccgcatgggactgcgcagtgtggtctgcatgccggacggtgcccccatcatgaaggtagaaagcaccaagcgtctgggcgcggaggtctgtctggtcaagggcacctacgacgatgcccacgaccgtgccgtggaattgcagcaggagaccggcatgaccttcatccacccctacgacgacgagcaggtcatcgcgggtcagggcagcatcggtctggaaattctggagcagctgccggatgttgaggcggtcatcgttcccatcggcggcggcggactgatcgcaggcgtggcctttgccatcaagagcctgcgccccgatgtcaaagtctacggcgtgcagtctgccggggccgccagcatgttccgcgcccaccgggatcacacctacgaaacgctggacaccgtggacacctttgccgacggcatcgcggtcaagacccccggtgaactgacctttgaactggtggaaaaatacgtggacgacatcatcaccgtcagcgaggacgagatcgccgccgccatcctctccctgatggagaaccagaaactggtggccgagggcgcgggcgcggtgtcggtggcagcggccctgtacggcaagctgcccatcgagggcaaaaagaccgtctgcctggtctcgggcggcaacatcgacgtgaacatcctctcccgcgtcatcaaccgcggccttgtcatgagcggccgcaagtgcaacctgatgattgccctggaggacaaacccggccagctcacccgcgtcagcgagatcatttccagctgcggcgccaacgtggtcagcgttcagtacgatctgggcgacaccaacatggccatcaccagctgcttcctcaagctggggctggagacccgcgacatgctgcagatcgaggagatcaagcaggcgctgaccaaggcaggcttcaagctggtcagcgagcgcgcctgacataccatcgtcattccaacctatttatataaaagaaagaagtgctgtatttatgaaagtcgtatccactgcaaaggctcccgccgccatcggcccctattcccaggccctggatctgggcaacatggtgtttgtctcaggacagatccccgtggaccccgccaccggtctgatggccgacaacattgcggatcaggcccgtcagagcctggccaacctgaaagccattctggcggaagccgggctgaccatgaaggacgtggtcaagacggtggtctttctggccgacctgaacgattttgccgccgtcaacgaagtctacgcccaggcctttgaggctccctaccccgcccgcagctgcgtgcaggtggcaggcatccccaaaggcgcccgggtggagatcgagtgcatcgcggtgcggcagtgacgttttccctttgctgacccgagggcgcaaaaaaagccgtgcccggccaatgaccggacacggcaaaagcacctttcagggcgtcacacagggacgccgcccttgcacagttcgatgaactgttttgccacacgggggctgcggcctcccgcccgcagagcgaaagcctcgcccttgcggtagagctgatcggcgggcatctggacgccgtactggcgggccagctccagcaggatagcatcaaaccgctgcttgtcggggctctggaaggtcaccgtcagaccaaagcgggccgacaggctcatgagctcctgacgggtatccccggcgtggatatcgtccccttcccggtcgctgaggcgttccttaaccaggtggcggcggttggaggtggcatacaccgcaatgttgtggctgcggccgcccacgctgccttccagaatcgccttgagggcggcgaaatcgtcgtcgttggaggagaagctcagatcgtcgataaacagcacgaatttgagcgggttgtccgccagcgcttccatgaccgccgggatctgatacagctggtttttcttgacctccaccaggcgcaggccctcgcccgcgaactcgttggcaatggccttgacggtgctggacttgccggtgcctgcgtcgccgtacagcagcacgttgttggcaggcagcccggccagcaaagccttggtgttggcaatgaccttggcgcgctcggcctcatagccgggcagctcgctcaggcgctggggatcgggacaatggaccgggaccagcgttccgttctccaccgtaaacacatggtggcgggcaaacatgccgtagcctttcttgcccacctcacgccggcgctgaagataggcggcggggtaatccgcttcctttgtctcccagcggggcaaaaaggcacaggcggcacgcagctgctcgggtaggtcggccagcaggtcgtccagtcctccgcagcccgcctgctgcaaaaaggccagctccgaggtcagggcatcttcggccgcccggggcgcaccgccggacgcagccttgcggatgcagatgttgtcattttccagcacggcatccagcaggtagtcggtccagcagcggccggtatcaaacagcgccgcttcaaactgcgcggcggaggtgacgaaagcatcctcccccgatgctgcggatgccagcatggccgcgtatttttcgatcacagggtccgagagcagaccgcgcagcaccacaagaccgtgcaggcggaggctcatttcatgaacatccataccaaaatcccctttatacttttcaagacatttctcgataccagtatacacgcagggtcgcgccttcgcaaggcgggacagggcaaaaagatgtgataattcacaaaacctgttgacaacggccggtatttgcggtatagtttatagcaaatccgaaatgcgtggatgggaagtagtaacgctgcggaaccccacagagagccgccggttggtgcaaggcggcgggcataccgcgtgtgaagtcatccctgagcagatccgcccaaccggttttccccagtaagcggatacggccgcacccgttagcgtgcagggctttgttggaagcccgttgagtgggtatgcttttaccggcatatcaatgagagtggtaccgcagagagcttttaccggcctttgtctcttggaaagcaggagacgagggccgttttttatttcccttttgccggcgcgaggatgcgccgggcagtaccgcaatacaggaaaaagcaggagaaggagaggatcacaatgatgctgacaggttcccagattttcgtggaggtgctagccgagcagggcgtggataccattttcgggtatccgggcggcgcggttctgaacctttacgatgagttatacaaaaactctgaccggatccgccacatcctgactgcccatgagcagggtgcctcccacgcggcggacggatacgcccgcgctaccggacgcaccggtgtggtcctggccaccagcggccccggcgccaccaacctggtcaccggcatcgccaccgcctacatggacagtgtccccatggtcgcctttaccggcaacgtggccacttccctgctgggccgtgacagcttccaggaagcgtatatcgagggcgtgaccatgcccatcaccaagcacaactacaccgtgcgccgggtggaggatctggccgacaccatgcgggccgccttccgcattgcccagagcggccgcaaaggccccgtcctggtggacattcccaaggacgtcaccgccaactcctgtgagtttacccccaaagctcccgagccggtccgcaccgtcacccgctacgacgaggagagcgtccgcaaggcggccgagatgattaacgcagccaagcggcctctggtctgcttcggcggcggcgtccgcagcgcggcaggttgccagcctctgcgggacctgctggccaaggcggagatccccgccacctacaccctgatggccgccggcgtgctggcctacggcgagcccctcaacctgggactgctgggcatgcacggttgctacaccaccaacaaggcagtggacgaggccgacctggtcattgccgtcggcacccggttctccgaccgcgtggccctcaagcctgagacctttgcccacaacgccaagctaatccagatcgacatcgatcccagcgagatcggcaaaaacgttgccattgacctggctctggtgggcgatgccgcctacatcctgcaggcgatcctgccttacgtggagcccgccaagcatcccgagtggatgtcccagatccgggaatggcagaaattcgactacaagcccgtggacagcgacaccgagctcaaaccccatcagatcatcgacgagatctgccgccaggcagggcctgacgccgtctacgtcaccgacgtgggccagcatcagatgtgggccgcccagtatctgcaccacaccaagagccgcggtttcctgaccagcggcggtctgggcaccatgggcttcggctacggcgcatccatcggcgcacagatcggccttggccccgacgcccgcgtcgtcatgctcaccggcgacggcagcttccacatgaacctgaacgaaggctgcaccgccgtcagctatgagctgcccatcatcaccgtcatcttcgacaaccaggtgctgggcatggtccgtcagtggcagacctccttctacggcaagcgctattccaacaccgatccccaccgccgcaccgactttgccaaggtggccgaaggcttcggcgccaagggttaccgctgcgagacgcccgcagagttcaaggccgcgttcgccgacgccctgacccagaaaggcccctgctggatcgactgccgcatcggcaaggacgaaaaggtcctgcccatgatccccggcggcggcgacattgccgacatcatcatggaataaaggaggaacccaccatgcaaaatcaggacactcccgataccagcaagcgcagcgtcatcagcatcctggtggataaccagggcggcgttctggcccgggtctccagccttttctgccgccgcggcttcaacatcgacagcctgacggtatccgccaccaacgaccccaccatcagccgcatcaccgttaccacccacggcaacgagaacgaactgagccagctgcttctgcagaccgaacgcctggaagtcacccgtcaggtctttgaactggatgagaaaaacagcctccagcgggagctgctgcttttgaaagtccaggccgacgtgcacaaccgtgccgagctgcgggagatcgcaagcatctataagtccaagatcattgacctgtcccccgacagcatggtctttgaactgaccggccgccccgtcaagatcgacgccttcctgctcatgttcaaggattacaacatcctggaaatgtgccgcaccggcgtcaccgccattgagcgcggcggcatgcaccatcacatgcagaaaccctcgcaggaagtcagcggcatccagtatccttatccgggtactgccgtcaaagcctgacccgtaccaaggttccccgccccaaccggcgctgaatatatacgatctggaagagatcgaatccaattataaaaggagtaaatctatcatggcgatcaaaaagtactacgattccgactgcaacctcggcgtgctggacggcaagaccgttgccatcatcggcttcggcagccagggccatgcccattccgagaacctggccgagagcggcgtgaacgtcgtcgtcggcctgcgcaagggttccagccactgggaaaaggcttccgagtttgctgctgcccacgaaaacttcaaggtcatggaggttgaggaagccgccaaggccggtgacatcgtcatgatgctggtccccgatgaactgtgcgccgacatctacaacaagcaggttgctccctacatgaccgagggcaaggcactggcttttgctcacggcttcaacatccatttcaagaccatcaccccgcccaaaaatgttgacgtcatcatgatcgcgcccaagggccccggccacatcgtccgccgcctgtacaccgagggcgagggctgcccctccctgatctgcgtggagcaggattacaccggcaaggccaaggagatcgccctggcttacgcttccggcatcggcgccggccgtgcaggcatcctggagaccaccttcaaggaggagaccgagaccgacctcttcggcgagcaggctgtgctgtgcggcggcgtctgcgagctcatcaaggctggtttcgacacactggttgaggccggctacgctcccgagatggcctacttcgagacctgccacgagatgaagctcattgttgacctgatcaacgagggcggcttctccaagatgcgttactccatctccaacaccgctgagtacggcgactaccgcaccggcaagcgcctgatcaccgaggagacccgcaaggagatgaagaaggtcctgaccgagatccaggacggcaccttcgccagcgagttcctgaccgagatgagccccaacggcggccgcaagacccacttcctggccgagcgccgcatgcagtccgagcacctgatcgagaaggtcggcaaggaactgcgcaacatgatgagctggctcaagaaataattcccgctgataacatgcagaccgtggtgggcgggcggcagccgccgcccgcccaccttgcggtttgtgacaatccggcggctggtttcctgccctgccggtcccaaaacgaaaggagcatttcccaatgcgcagcgataatgtaaccaaaggctccgagcgcgctcccaaccgcagcctgttctacgccctgggctatacccccgaggaactggagcgtcccctcatcggcgtggtctcggcttacagtgagatcgttcccggccacatgaacctggacaagctggccgacgccgtcaaggcaggcgtccgcatggcgggcggcactcccatcctcatcccggccatcggtgtctgcgacggcatcgccatgggccacatcggcatgaagtactccctggccagccgcgaactcatctgcgacagcgtggagaccatgctcatggcccaccagctggacggcctggtcctggtccccaactgcgacaagatcgtccccggcatgctcatggctgccgtccgcatggacgtgcccgccatcgtctgctccggcggccccatgctggccggcagctacgacggagaggaagtcagcctgtccaaaatgtttgaggccgtgggcgcctacaaggccggcatgatcaccgacgaacagctggaggactgcacctgcaactgctgccccagctgcggcagctgctccggcatgtacaccgccaacagcatgaactgcctgtgcgaggctatcggcattgccctgcccggcaacggcaccattcccgccgtttactccaagcgcctgcagctgggcaaaaagtccggcatggccatcatggacctggtccgccgcggcgtcaccgcccgccagatcgtcaatgagcgctccatccgcaacgccctgacctgcgatatggctctgggctgctccaccaacacggtgctgcatctgctggccatcgcctacgaggccggggtccccattgatctcaagctcttcaacgagatcagcgccaagacccccaacctctgccatctggctcccgccggccccacccatatgcccgacctgtatgccgcgggcggcatccccgctgtccaggcagagctggccaagaagggactgctggacctggatgttcccaccgtcaccggcaagacgctgggcgagaacattgcgggggcgcacatcctcaacgagaaggccatccgccccatcgacgatccgtacagcgagaccggcggcctgcagattctgtggggcaacattgcccccgacggctgcgtggtcaagcgcagcgccgtcgctcccgagatgcagtgccacagcggccccgcccgcgtctttgacagcgaggagcaggccatcaccgccatctacaacggcgagatccatcccggcgacgtggtggtcatccgctacgaaggccccaagggcggccccggcatgcgtgagatgctcaatcccaccagcgccctggccggcatgaagctggacaccaccgtggccctcatcaccgacggccgtttctccggtgccagccgcggcgcggccatcggccacgtcagccccgaggctgcctccggcggccccatcggcctgatccaggagggtgacaccatctccatcgacattcccaacgccagcatcacgctggaggtcagcgacgaggaactggcccgccgcaaggctgcctacgtccagcctgaacccaacgtcaagaccggctggctgagccgctacgcccgcatggtatccagcgccaaccttggtgccgtcatgcgctgagtcgatttcttcccaaacccgtaaacaactgccccggcagggagtttccctgccggggcagctttttattttgtctgttccgtggggagccatttcgcagaaagtcagcccaaatccatacaaaagcgccggagcattaggaacttccaagtgctccggcgtttgggaaaagattctgttgttactcgatggtaatgccccagcaggcggtcagcgatgcgccgggggccagctcctcatggcgtccttcctcgttgacgctgttggcccagccattccagggttccatgcagacgaagcgctcggcatcctgctgccagagcacgccgttgccgaagtgatcgtcaaagtccaccgtcacccggtgtccattgccggagtcgctgaaactcatgggggactccacgccggtgagcagccggatggaatcggcggaaccgggcttgcgggtcagtgtcagcttggcgggcgctgcgggctgagggcctttggcgtcctccgagcaggtcttggcccggatgtcaaagtccacgttttccagcgcggatgcggcaaagtagggatgaaagccgaagctgaagggcatgggcttgtccccgttgttcttgacggtcaacgccagttccgcccggttgccggacagggtgtaccgcatggtcagcaggaaatcgaagggatacacaaacttggtcagtccgttgggggccagggtcagaacgatggcttcatcggttgcttcctgcaccgtccaggggaccagatccgcaaaaccgtggatctccatggggtaggcgctgccgccgaactggtgcacgccgccgtccggtctgccgcagttggggaacaggatgggaatgccgcagcgggggcgatcggtggattcaaagttgccgtcccgcagccagaggtattcctctccgtttttggtgaaagacgtggccatgccgcccttctccggggtgacggtcagcgcgcagccgtcatccgccagggtcagcgtggcgtactgaacaccgtgtttttcatacaagccttttttcagttgagaagccatgtcgggcactcccctttcctacatgtgtgcgctgtcaacagcaaaaaacaacggggattttgtttttgcatacggaaaatacggaccattccacggcggcaggtcacgttcaccgtgtccaggaaccgcacttccaaatgccatcgcccggccatcaaaaattgcggtcaggctccctgttttcccctgctgatgcagcgcagggattcttttttcttattatatcacatcaccgtccggcagggcaggataatttctgcaaaataccttgctttgccatgggcttttcttttttgagcgcgcacaaatgtttgacgtttgttcgtttctttttgttctttcaccttgcacaaatgattcctgttatctttgtgcgttttttctcgaacaacgcaatttttgcaacttgttgaagaactttttgctatgtataataaatacagaaactgtttatcctccgtcaaagcggcgtatcaccgacgttgtctggcggacaagcaaaggagagctgccatttatgaaagcatttatggacaaggatttcctgttggagaatgacaccgcgcggcatctgtatcatgattactcggccaagctgcccatcatcgattaccactgccacattcccccgcaggaaatttacgaggaccgccgttttgaaaatcttgcccaggtctggctgggcggccatcaggtcgtggacggcaaggacgtctacttcggcgatcactacaaatggcgcgtcatgcgctccaacggtgtgccggaagagtacatcaccggtgacaagcccgaccgtgagcgtttccagaagttcgtcgagtctctggaaatggccattggcaaccccatgtacacctggtgccatctggagctaaaaaagtatttcggctacgacggcgtcctgaacaccgagaccgccgaggaagtctggaacctgtgcaacgacaagctgcagcatgatcccaacatgaccgtccgcggcctgatcaagcagagcaacgttgccatggtcggcaccaccgacgaccccatcgattctctggaatggcacaagaaaatcaaggaagaccccaccatcgatgtggtggtcgctccctctttccgtcccgacaaggccaccaacattctcaagcccggttttgccgagtacatccatcagctggaagctgtcgtcggccgcgagttcaagtgcgtgggctgcgtggtcagcgctctggaagaacgtctgaagttctttgtggagatgggctgccgtgccgccgaccagggcctggattacgtgccctacgtcgagaccgacgccgccaaagcgaccgccgctttcaagaaagccatggccggtgagcccctgaccaaggaggaaggcgacgcctacaccacctacatcctgctggccatgggccgcctgtaccacaagtaccatgtggtcatgcagatccattacagctgcctgcgcaaccccaaccagaagatgttccagaagctgggtgcagacaccggctttgacatgatcgccgtgaccgacggcagcgtttccatcagcaagctgctgtccaagctgaccgaaaccgatgaatgcccccgcgtcatcctgtacagcctgaacccctccgacttcgacatgctgggcaccatgatcggttccttccagggcgacgaggttccgggtaagattcagctgggcagcgcctggtggttctgcgataccaacgacggcatgaaccagcagatgcgcactctggcccgtctgggcctgctgggcaacttcatcggcatgctgaccgacagccgcagcttcctgagctacacccgccacgagctgttccgccgcctgatgtgcaatctcatcggctcctgggtggagaacggccagtatcccaacaacgaggcttccctcaagaagatcgtggagggcatcagctactacaacgctcagcgttatttcaatctgtaattaccgggctttgcccgacagacaaagaaggcccctgccgcatggcaggagccttctttttttgtatgtttccccggcagcagcgccgcaagaccgcatggggtgcgggctgctgctgattcaagcgtgagccaaaagcggcagggttgcggcggtattgccgtcatgcctcggggcgccagccctttgccacgtccacccagcctgcaaaattctgcacggcgctttccagttccggtaccgtaaggcggacagccgagctggccgtaccggctgccgggtacacgatgtcaaaccgcttgaggctttcatccagatagaccttgacctccggatgtacggcaaagggacagacgccgcccatgggatgccccactttttccaccagatcatcggggcggatcatggccgccttggtatggaactgtgccttatagcggggattatccaccttgccgtcccccgccatgacaatgagcaccgcgtggccatccaccagaaaggccatggttttggcaatgcgcgcttcctcgcagcccagatcggctgcggcttccgccacagtggcggaacttgcgtcaaattcgatgacgcggtcggccagccccatgggggccagatattgcttgacttgttcgatgggcatattttccctcttttccgacaattccatcaagtatttcaatcagttccgtacaatatcaatggattcgattttgagcacggtcccctcattttgatacacacggcagctgactttttcagctttttccgtaagttcgagcgttatctgtgctgtgccatccgcctgcaaagatgtataagcaagtatctggtagccatcttccgtttttatgccaacttgtagttgggccggcatatcctgcggcatttcaacacaagacgcatttaaggtcactgtgtatgtaccgggcatccagggttctgtctcccctaaaaagggatatcccgaaaccggttctgtcacaagaataccatcttccactttgccatttacaacatacagatatccgttttgcggggaaagcgaccattttgtcagatagatatggcgattggccggaatcgtcacgacttctttttcttctcccaattccgacaaccgttcgttcagccagaccatatcctccggatcctgcgaactgacgacctccatcagtgcctctgcctggctttgatccatatacaactttcgcagatccagattgctgtcgcggaatccgtcacaaggaatccagattgaagtattggaacggccatgcaatgtggattccagcggcgtatacagctgcggaatgtactgaagcaattcctgtgtaatcgcggtcggtgcaacatagctgctgttcggagcgccaattcctccatatgcaacaatcacactaccggtatagactgccgaacacgcaagcgccccggcaaggatgcgtttgggcaatattccttgcagcaggtctttccactgggtgcacacggctaccgtcatcaaagccgtagaccatgcattatagcgggcaatgccatccatgccgcagttgatgttcgccatcagtgaatatcccagcatcgcccccagaaatccggcgctcatccaaagatatctggtgcaacgctttgccacggccagaaccagcagccccccccagacgatcagcaaaatgggcatgtaaggcaaaataccaaagttccagtcggtaaaataagcccacaaatgccggaaaatcgttccgtcatccaacggaatccattcctgaccgtaagacgcagtcagattgatcgcgccgcaaatggaataattgtaagcaaacggtaccagtcccggcagatagcagcatccgtaaagaatgatctctttccatcgtgccacaaactgtttgacgcgctgtcccgcccggcctgtcgtttctttccatacggatacgaggtattccccgatcattgcaaggccaatggccaaaatacaaggattggtcgttccagccacagcaatcagcagcgccgccaggtgctttcgtccggcagcccaccaaatcgctgcgattgcaatgcaggcaaactgaaacgcttcagccgacgaccagctgatatagaaaattgccggatgtactcccagcatcaggcaaagggccatccgctggctcagcttcagtctcggctcaaatgctgcaacggccagcatcagcagcatacacaccaaatttgtcaaacaaaaggcatagtgcagcggaagccccagcagtgccagaagccccagcatcggcaggcaagccgccggatatgttgcaaaataccagggtatgatcccctgtgatgtagtatagtgagatccctcaaagccttcataaatgccggcatattgcgggaaccatttttgagccagctcgatctcctcctgcgaaatgatggcattgccgtcgttggccagagataccgtcgtcagcgtataactcgccgcttccccgcagaacttgcttcctgcttttacagtagtcaccgtaagaaacacggcatacaaaatcacaacgacataaaacaatcgctgtttccacacttgcatgtttgcttgcgtatttttcatctactctttcccttgtttgaaatcactttttctttcccagcagtttggtgcggatataagcgaagcaggcatcttccccctgatcccgcaaaatttgcaggcaggtctccagctggctgcgggtgtccggatgcaggatataatgatccttgctgtgggcgtagtactcccatgccgaagcatcggtgtagttactgcccttgtaattcttgctcgccgcgatacggtcacataccatctcggccacgtagcgctccggcatccgcattcccgccatggcgtggtcccccgacggggagtagtcgatccagtattccagatggtgcttgttccggcccttgtgatgcagccatgcggcgctgtatccttccgcctgacgctgggcattattggggctgcaggtcccctgccagtattttgccccggccaaaaactccaccggcgccagcttgctcaaatcatgggtcaggccctgccagtacaggccacagcggaagcaataccgccgcaccagcactttatggtgatggatcgtcttataatgtcggatcggatgccacacgcgcccgtttccctccccgtctgcagtcggagctttctcctgccccggcgatgtgtttttccccggcaggtacaagttctctgcgcaggtctgtttttattttaatacggatttccgtttatcgcaacgcagtcattttccccggactttctcgaagcccagccgcagccagaccatcagcaggacagccagcattgcagcgctggccggcaccgccgaaaactggaacagcaccgggatcaggtgggaatgaatatccgagtgtgccttgctgagcaccagccaggacaccggcgccagcaccgacaatccccacacacagaacatgggggcagtcaggcgcagggtctgccatttgcgcagaaccgccagcacaacagcggacagcgccgccactgccagcgtaatgcccaaaagctgccccagcgtgagggaaagtccacccagcgtcagcaccggcgtggcgtcctgtacaagatattttgtcagcacaccacccacggtgacgccttcccggacggcatcgtcgctgacgctcatacggctgcctgctgcgcccagaatattggcaaggctgtccgaccagttgccataataaaggtatccctggcacagccagactcccagcgccgcagcgacgcctgccagggcggaagcccccgcagcggtcatgcgcagcacccacaccctcgccgggcggccggtggccaggcttctggcccaacaccagacaagaggcgtttcgcacaggatcaggaaagtggaaacaaattcaaagccgcacatgcagcggaccatgcaggccgccccgaccaccacaaaggcccacaccggcgttttcccccggcgaatcgtactgccgcacagggcaatgcccgccaaaagcggcagcatccagatccacaggcaccagtaaaggtctttcatgccggtctgaagccccggcgccaggcagatcgctgccagccataccaaagccggcaatgctcccgcagcccggtacagcgctgcgcagacaagcagtgtggcaaagtaatagagaactgcgttcgtggtatagagcatcgtctcccgctggacaccgtcgtcctggaacacggaatagactttattgagcacccccagtgcccagccctgcaggccgctctggtgggtatagctctggtagtcctgagcatccacgggggtattgtcccggtaaagataccggttttccccatcgccccagtcctgggtatacactcccataaaaccgccgggcgcgctttggtcctgctgcatttggagcatcctgccgaacaccagggcctgagaatagtcgtcccagctgcctgtggcataggtgctgccgtttttcagcgttatggtcagcacaacggcaatcagaaacaggcccagggcctgcaaaaaggtccagagcctgccatgatgccgcgcccacgccgggcgcggcaaagatttacttggcaaaaagtcctgctgcataagaatgcggccggcctcctttgggttagatttcagcgatcccacttgtcgcacagagcctgaatctggctggtgaacttggcgagatctttattggcacccccgcggttgtgctcgatgaccacaagcagccgcttgcccatattgagcagacgctcaaaggccggactgctgcggacaacatccttgctgccgccggtggtctttacgattttctggcggttgccgtcctccaggcactggaccgccttgccgcaaagttcatagaccgaaccgttatagggtgccgatgccgcaaagccctcgccgcgcagatgggctgcccaggtctcggccacatcatcgtcgccgtggttgacaaagacaaatgccggtttgggatcaaagctgttgatccaccggtccaggcccgtccggtcggcatggccggacatgccggtcatctggcggatctcggcattgacctgcacatcctcaccgaacaggcggacttcatcggcgccttccaccagcacccggcccagcgtgccgccggcctggtagcctacaaaaaggatggtgcattccttgcgccagaggttgtgcttgagatggtgacggatccgtccggcatcgcacatgcccgacgccgagataatgaccttgggtgtattgtccaggttgatggccaccgagtcatccttggtctgactgatgcagagccccgggaaccagagggggttttcgccagagcgcaccagttccagggcttcggcgtcatagcactggctgtaattttcacggaacaccgttgtggagcggttggccagcgggctgtccacatagaccgggaaaccgtcgtggccatgtatccggccctccgccttgatctggcggataaaatacagcagttcctgggtgcggcctaccgcaaagctgggaatgaccacattgccgccccggtccagggtggtctgaaggatctcggtcagttccccgatatagtcggggcgtggcggatggtcccggtcgccgtaggtggattccatgacgacgaagtccgcttccttgagataagtggggtcctgcaaaagcggctggttgatgttgccgatgtcgccggaaaagacgatggtctgggtctcgccgttttcggtgatccgcagcgtaatgctggcgctgcccaaaaggtgtcccacatcggtaaagaccgcttccacctcgtcaaaaattttcaccggcgtgccgtattgctggggctggaacaggcgcatggcgttctcggcatcctcgatggtgtattccggctcgatctgatcccggccgctgcgcttggctttgcggtttttccactcggcttcctgttcctgaatgtgagccgagtcctccagcatgatctcgcacagatccatggtggggtccgtggcataaatggggccgcggaacccgtttttatagaaatgcgggatcattcccgagtggtcgatgtgagcatgggtcaccaaaatcgcttcgatctcggccggtgcgcagggcagcttggtattttcatacacatcgcgcccctgctccatgccgcagtccaccaggaaccggtgccccgctgcttcgatcagcgtacagctgccggtgacctcacgggcggcacctaaaaattgcagtttcatgacaggacctccttatttcaccgacatcctatgccggatggttttgtcttgtctttcccgtttcccgctctatggtttctctcagccggtgacatccccgcggcccacgccgtaacgcggcgcttcgggcagggtgaatgcctcggtaaaggcgccggtggcatcattgatggccatgcggatgcaccagaaggcatcgccgtaatcccgcagcacggtgtagctctgatcgctcaggccgcgcagggtggcagtatcggtcacgatgagcaccgtggcgtcctcggccacatccttgctcagcaggctctcggtgtaggtctcggtcaccgtgccgctgttgagaagttccagatacgtcgcgcccgtggcagcgaccagctgcacccgctctccgccgggcagggcgtccagcagggcgccgcgggtgatctccccgtagtcaagctcgctgacgccgccggccaggcccaccggggtcatggaagcgtattctgccggccagttgtcgcggtcggcttccgcaaggttcagataggtctcggccacatagttgccgaagctgatggtacggctggcctgctcatgggtgaacagcgtctggctgcggaccgattcgtccccctgttccagggtgtccaggccgctgcgtgccgaatcataagcggcggcgaccgtctcatcaaagctggaacgggcagccgtcatggtggattgggtgacctgagacgccttggcggtcacggtaccggaagcggtgaaggtcagctccaggcagcccactgccgaaagcccgccgcccgccgggacaacggtgatgccctgggcggagacttcctccgtctcaccgcccgcaatgaccgcgttgactcccagatcggccagattgccgaggactgcggtgtaatcggtatcggggcccaccacgcagacgatggcgtctacgtcctccgcccgcagagccgccacctgttcggaggcagtctgggccaggtcggcggcgctgaggtcgcttcccttggcggaattgccgatgcttgccagggagaagaagccaatgcgcttgcccgccgtcttgatcacggcattcataccgttggtgatgcggttgcggttccagctggtgctgcggtagaacagcggcacgccctcggcgttgcgcaggttggaggccagggactcgcccgatgcggtgaccacgtcgtccagcaggcgctcggtgccaaaggcaaggtcgctggcatcgaagcactgaaggtcatagcccgcagccgagaaagcagaggtcatatccataccgccggtcaggctggtggcaaggctgccctgcaggctgccgcccgcatcgatcaggatggcgtcctcattgcctgccttgagggccgagacgtccgccaggctgacatcgccgtcggtgatggtgccgttcagcgagccggtggcgtagatgggaacggtgatgtcccccacccgcacggtgcattccgcccaggtgcggccatccgccagggtggcggtgacggtgcactggccgttgccctttgcctggacaacgccctttttgctgaccgttgccacatccgggtcactggtggaccagtacactttctggccgccgtcggtctcttcgggttcgtccagcgtgatggtggccttgtcgcctttctgacccagggacagttcgctcttgtaggtatcgttggtgaaggaaggttcaatgaccttgccgtaggtatcggtgatgccggtcatggtcagttcttccatgacaaagtcgatgtccaccgtctcgctctggacgccgtaatcggcgccgggcgcctggtaggtagtctgccacatggagtaggtcccggtatatcccagctcggaggaataccgcgcgatccacagttcctcccgccagggatcgaacgccgggtcgtcaaagcgggcgcgcacccagttgagggaggcataaatgccctgacggccggtgtacccgtactgttccagctggtcaaagaacgccgccgtgatggccgccatttcttcggggaacagaccggtgatggaggcgtcctccaggtcatagtacaccgggtagtccagcttatagggtttgtcggtataatcgggcagttcctcgtaaggagactcgatcagtcccagcaggcgggccacatgagcggcctcgctgcgggcttcctcctcggtggtggcgtaggaatacagatacacgccaaacggaatgcccagctcggtacaggcgtcggcattgcgctcccagtaatcatcgtcctgggtgtattcgccctcgccgttccactcgctgccgatgccgcagcgaaggatggcaaagtcgataccggcatccttggctttctgccagtcgatctccccctgatatttggagacgtcgattcccttcagcgtggcggccaggatgggctctccggcgctgttgaagtaaaatccggcgtcattcttcatccaggcgcctgcactggtccccgtttccgggacggcaggctccccttccgagctctgcgtcaccagaaacagaaccaggcagaataccacaatgacaagcagggccagacccggcaggatcagccgctgtccgggcttgtttttgggtttgcgtttgtatcgtatcgtcgtttgcttcacgttggcaattcctttccgcaagaggtggcagggcggcgtcccgcgggaccgtcgcaggccgggcacaatgtatttgtatgcggcacagcgcgtatggatacagcagggacaatatacttgtttatatggtatcattttgtcgaataaattacaatgctgtaaccaaattcccccgggcggaaatctatgccagaccttttgcgctgtggcagaaaaaagaagccccggtctgccgtgtcacggcaagccggagcttcttttgtttcggtttcgtcatcatgcgcagaacgcagtacgcgcggggcaacccggaatcgatgcagggtgcaccggcaggagcaggtcattcctccccggccttggcgctctccttgcgggctgtctgctgcgcccggatctcccggaattccttgttgagggcggcctccgcttcggcttcctcgttcttgatttcccagtggagcaggaaggtcagcgccgcccgcagcacgataatggcgcccacaatggcgatctcactcaggtcacgcaccaccacggtacgcaggatctcgctgcccagtttgaactccaggcagagcgccatacccttggccagcttgagccgcaccatgggatcgtgccggatataattgatcacgccctgcacgcccgcaacgatgagcaccgccacgcctaccagctcaaacagatggatggcgttgctgaccagaacgtccagaagggtctccataaacatttcaaaggtttccacaggggatctcctcctcacacaattttgcctccggcccgcaaaaaccggacaaacagcgcaaatatgcacagattatatcaaagcgcccggaaaattgcaagttttttcgtcctgtcgaaaatatttcgcatatactttcccgtcggggctgtcacgggaaggcgtatcgccgctgcttgcgtcccatgttataatggaagcagagtggccgtgcgcggtattcttccgatagctttccccgtccgcggggaggcatgcgaagcccggcgccccacagactgaaacggaggctggatatgctatgaatgtgcttttgatcaacggcagcccgcacgagaaaggctgcacctataccgctctggccgagatggcccgcgtcctcaacgaggaaggcattgagacgaccattttccacatcggacggacgccggtgggcggctgtgtgggctgcggcggctgcgccaaggcgggacactgcgtctttggcggtcccgtggccgacgtggtgccgctgctggaaaaggctgacggcgtggttttcggcgcgccggtccactatgctaccgcagcaggaagcatgctgggcttcatgcaccggctggcctactccgccgggcggtatctgcgccacaagcccgccgccgtggtgaccagcgcccgccgtgccggcaccgtcagcgctctggacgccatgatcaagatccccaccttctacgagatgccgctggtcaactccacctactggcccatggtccacggctccaacgccgaggaagccgcccgggacgaggaaggcatgcagattatgcgcaacctgggccgcaacatggcctggatgctgcgctgcatcgaagccggcaaggccgcgggcatcgaggctcccaccgccgagaactccatccgcaccaatttcatccgctgatcgttttcccggctctctgaaatttaccgaaacaaaaatccccgtaccgggcagccatgcctgatacggggatcttgtttttgattgaggcttacaggaccttggacaggaaagcgcgcagacgatcgttgtcggggttggcaaagaattcctgcggcgggcggtccaccttgaccacgccttcatcgatgaagatgacgcggttggcgacctcgcgggcaaagcccatctcgtgggtgaccacgaccatggtcatgccgcccttggccagttccttcatcagttccagaacctcgcctaccatctcggggtcgagagcggaggtgggttcgtcaaagagcaggacttccgggtccatggccagcgcacggacaatggcaatgcgctgtttctggccgcccgaaagcatggccggataagcgtccgccttgtcggccagaccgatgcggcccagcaggtccatggccttggcatcggccgcgtcctggctcatcaggcccagcttggtgggggccagggtgatgttgcgcttgacggtcaggtgcgggaacaggttgaagtgctggaacaccatgcccatcttggcacggatcttgttgatgtccttctctgtcacctcgacgccgtcaaacatgacccggccggaggtgggttcctccaggcggttgaggcagcgcaggaaggtggacttgccgcagcccgaaggcccgaccaggcagacaacgtcgcctttattgatggtcaggtcgatgccccggaggacatccaggcctgcataactttttttcagattctcaacgacgatcactctgtctcagcctcccttccagtttgcccagcagccaggtgaagatcatgaccagcaccagatagatggccgcgatgcccagcagcggatacatggcttcgtacgtacggttcataatgcccttggccgcatacagcagctccttgccgccgatgacggtgatgagcgaggtatccttgagcaggacgatgaactcattgcccagggctggcagcaccgacttgatggcctggggaatgacgatgttgatcatggtggtggtgtagttgaggccaaggctgcgcccggcttccatctggccggggtcaacggccatcaggccgccgcggatgatctcggacacgtaggcgcccgagttgatgcccaggctcaaagcaccgaccagggtatactcacggctggatgcaaagatgaccatgctcatgatgagcagctggaccatcatgggggtgccgcggatgacggtggagtacaccttacagatcaggttggcaacgcccagcaccggattgcggtgtccgggacgctgctggtcatgggccacgcgaatcagcgcgaccacgctgcccagcaccacgcccagggccagcgccatggccgtgacgagcagcgtcgtgcccacgccctgaatgtactgctgccagcggtcagcctccagaaacgcctgatagaatttgacgaaaatatcctgccaaacagtcagctctccgccgctttttgccagattggacagcgtctcaaattgtgccgccaagtccatgcccacatccacctttcttttgggtcggtgccgcaccggaagctcccggtgctttggttgattgccgccactgacggcgcggtcaatgccgcttggggcggcaacaaaagagagagcggcccgcccggctctgccggggtgcggacgctaacgcccgcatggtcgccctccctttcaggcggaatgtccgcccgttgtcttttttcagccgttcacggacaaagtgatcactcagcggtgatgtacttgtcgatgatggactggatggtgccgtcggccttcagctcagccagcgcgccgttgatggcgtccagcatctgggtgttgcccttcttgacgccgatggcgtagtcctcgttgacgtactcggtgtcgaggatcttcaggccggggttggcagcaacgaactcctgagcgggagcattgtcgatgacaacgcagtcgacctggccgttcatcagagcctggacagcggtcagaccgttgtcgtagggagtgacgttctcagcgccgaagccgccgttctcgacggtgtcggagcagtacaggtcgccggtggtgccgcgctgcacgccgatcatcttgccggtcatatcgtcaacggaagtgatgtcggaatcctcagggacgatgacgacctggatgccggtggcgtagctctcggtgaagtccaggttgaccagacggtcctcggtaacggagacgccggccataaccatgtcgctcttgccggtctgagcagccagcagggcggagtcaaagtccatgtcgtcgatgcgcagctccaggcccagcttgtcggcaatggcctgagcgatctcaatgtcgatgccctcgaactcgccggcgtcattggtcatttcgtacggcgggaaagcggcgttggtggacatgatgagcatgccttcctcaacggtggtcagctcgccggcagtggcggcagactcggaggtggactcctcggtggtagcagcgctggagctggtgtcggcagcgtcggagctgctgtcggaagaagtgttgctgcaagccgccaggctcagggccatgacggaagccagcaggatcgaagtcagttttttcatgttcgttcccctcgtgttctctctttattttttgtggttagggtatcgttttcgcgccggcacggtatatgccgtgtcctccccggcgactttatcagtatgatgcataaaaactacattgtcaatgtatattttacaaattcgtcaatttgtgtagcgggattgccgatgcgccgcgttttttgtgcagttttttcgccttttgttttccccttttccaaccgccggcaaatcgccccgcggggcaatctgcgatgcagcgtttacctgcctccgccgctctgtttccgttttttgcccaccataccaaaaaatgacctgggcatagcccaaaaaggcagcatcccgggcagaataatttgcatatcaaacgtatatttattcatatttgtgaaaaatcttacactgtattctcatacagggactttcggcccgttctgtactattgacacccatcgcccccgatgctagactgaacttgctataaataggtatagagtgcggcataagccgcgttggggtgctttgctgtatgcacccggggagatcgcgtccattatgggacgcaggggggaatcatcatgacattagccgaactttccgtcggccaggacgcccggatccgcacggtaggcggcgagggcgcacttcgccgtcaccttttggacatgggcctgacaccgggcattgaagtcacactgcgcaaggtcgcacccatgggcgaccccatcgaactggaactgcgcggctatgagctgacgctccgcctggacgacgcccgtaagatcgagatcgaaggcgtacatacttccgaccgggcggcccgttcggaggaccgccacgatcaggtgccgcatcccggccggggcgagatcgggcgcgcgcccagctaccgcacccgcaaaagcggcgacgtgatcccgaaaaatcagccgctgacctttgctctggcaggcaaccagaactgcggcaaaaccactctgttcaaccagctgaccggttccaaccagcacgtgggcaactttcccggcgtgacggtggaccgcaaggacggtcagatccgcggccatgccgaggctaccgtcaccgacctgccgggcatctattccctgtcgccttattccagcgaggagatcgtcacccgggatttcctgctccagaataagcccaccggcatcatcaacattgttgacgccaccaacatcgagcgcaacctgtatctgaccatccagctgatggagctgggcatccccatggtgctggccttgaacatgatggacgaagtccgcgccaacggtggcaccatcatggtcaaccagctggaagagctgctgggcattccggtggtgcccatctccgccgcccgcaacgagggcatcgacgagctgatcgaccacgccctccacgttgcccgccaccgggaggcccccggccgcatcgacttctgtgaggccggcgatccggacgatccccgcggtgcggtccatcgctgcatccacgctatcgtccacctgattgaggaccatgcccgccgggcagggcttccgccgcgctttgccgccaccaagctggtggagggcgacgcgcccatcctggagcagctccagctggatcagaacgagaaagaaatgctggagcacaccatcgtggagatggaacacgagaccggcaccgaccgggaagcagcgctggccgatatgcggttccactttctggagcagctctgtgcccagaccgtcgtccgccccggcgagagccgcgagcatcgtcgcagcgttgagatcgacaagatcctgaccggacgctttaccgctatcccctgctttatcgtgatcctggcgctggtgttctggcttaccttcggcgtgatcggtgcggcgctgtccgacctgatgaccctgggcatcgaccgtttcaccgccctggtggacaccggactgacggtatacggcatcaacccggtggttcattccctggtcattgacggcattttcgcaggtgtgggcagcgtgctcagcttcctgcccaccatcgtgacgctgttcttcttcctgtccattctggaggacaccggttacatggcccgtgtggcctttgtcatggacaagcccctgcgccgcatcggtctgtcgggccgcagctttgtgcccatgctggtgggctttggctgctcggtccccgccatcatggccacccgcaccctctcctctgaccgtgaccgccgcatgaccgtgctgctgactccctttatgagctgctcggccaagctgcccatctacgccctgttcacggcggcatttttcccgcggggactgcgccccgtggtgatggtcggcctttacctgaccggcatcctgtgcggcgtgctgtatgccctggttctgcggcacacccggttccgcggtgagccggtcccctttgtcatggagctgcccaactaccggctgcccagccccaagagcgtcggccgcctgatctgggaaaaggcccgggatttcatccagcgcgccttcaccatcatctttgtggccaccgtcatcatctggtttctgcagagctttgacacccggctcaacgtcgtcacctcgccggaaaacagcctgcttgccctgatcggcggatggatcgccccgctgtttgccccgctgggctttggcgactggcgggtctccaccgcgctcatcaccggcttcaccgccaaggagagcgtcgtctccaccctgaccgtcctgctgggcggtgatacgggattgctcggcaccatgttcacccccttcaccgccgtggtctttctggtctttacgctgctgtacaccccctgtgtggctgccatcgcggctgcccgccgggaactgggttccgcccgcgcggcggcaggcgttgccgccatgcagtgcctgatcgcctggctggtggccttcctggtccactgtgccggcgccatgatcgggctggtctgatcgcacatttcctacaaacaggagttttaccatgaatctgcaaagttttctcgtcctcgtcgtgattttcgttctgctgggtctggccgttgccttcattgccaaaaacggcggctggcagggcggctgcagcggtcactgcgccagctgccagcagcgctgcgcacagcagaacaagaaagacgaggaagaaaccaaaagtgaggattgattggctttcccgccttttgatccatcggttttgagtttatccacgatcaaaaatcccggcaccggctttcctgtgggaagcccggtgccgggatttttatttggtccgtgattttcaaccgctgcaaatcctgtaacccgaaaaagtagtcctgcggtgatacatcattcatgaaaaccgacttattgtccggcattgtcatccgttgccgccggagcggttccctcttggttgttttgtggtttcgttgttccggcagtgggatatgccagcggctgccaggcgggtgtcacggtatcattcccatcgccatatttcggaaaggcttggaggtctgcttgccaacatacaaaactcaacaaaaaaggcgccctgccttcccatggggaaaacagagcgtctttttattgttttgttcgcctgttcactgcgagcagattacttcgccttgttcttacgggtgtagagaacagtgccggtcaggccagcggcggagacaaccagcagcatcatcagcaggccgaggttcatctcgtcagcggtctgaggaacggtgttgttggtgacggtcgcagtggagccggcagcgctggtagcgggcttcggagttgcagtagcctcatctttgccccaggtgccgttctccttggcatcggcgatctcgggatgctcgtcgaccttggcaacgacggtgcccttgctcagcagcttgccgcagatggagcagtaggtatcgccggtgtagccctcagagtcgggagtggcatccttgttgttgcggatctcggtcttgctgtggtcgcagacaacatagttgccgttttcatcgacaatcaggtcagcattgccggggttgacaacggtgttgctgtcggtgacattggggttggtgtccatcttgatgaacgccagatccttgccgctgttgtccacgaaggtgacattttcatcggcgaaggtcagagaagcgctgcccttattgctggcagtaccgttatccaggttgatgccgtaccaggactctgcaccggcaatgaccttcaggccattctgagcggtgacttcggagctggcaacgaccaggggcgcgcccttgtaagcagtggtatggtcaagagtgacattgtccagaacaacaccctgagcctggaacaggttcagagcatgcgcgttgttctcaccggtctgcagagtgatgttcttcagggtcagatcgctgccggtgacagtgaccaggctatcggtagaagaggcaccggtcttggcaaaagagccagtcgcaaagatcttgtgaccgttgccgttgatggtaacaccattggctgcaacagccaggttggaagtcagttcaatgtcattgtcgaggacaatgttggcattttcaaaggcaacagcagccttcagagcttcctcggtggaaacatggatctcctggggaatgaactggccggaggggctcagctcaaggccggcattgtcagcgccgggaaccgcatcttctgcgttatcgccatccttcaggctgaggaccagaggcatcttgttcttctctgcagattcatcggtgaaggtaacggatgccgcgttggtaaagtcgagagaagcagccacgccgttcttctggctgtccacgttgatggcataccaggagttatcgccggtgatggtctggaagctgccggtaacgtcaacattggcaccgttgacgatcatggcagcgccgccctgggtattctggttatccagaacaacattgttcagcacaacgtcagactggtacaggtccagagtgtttttgttggatgcggtagcgaccaggttcacgtcgttcaaaacaacgttctcgccgccctcaaccttgaacaggttgatctggccgtgggtgcccatagcaaagttgtcggaagcggtaatcttgtggccgttgccgttgatggtgatgttgtcaacatccttgatgtaagccatctcatcgacggtaatgtcctcggtcagctcaatggtggtgccggaacacagcttgtcggtgatctgcttgacaaagttgatgttgttgtcaaccttgatggtgaaaccctcaagtttaacattatcaccgctgacgccgggattccaagaccactgaccttcatacgaataacccgcgtaagagttattggtgaagtcctcaacaatgttggtagcggtaaccgtaccggtggtcactgcacgggcagtgatccaagaagacagcgtaacgtttgtcagagtggtctcgcctgcatccgcaacattgatgtagatggatccgctgcacagcttgccatcctcatccgcaaggggcagcagttcaacattttccaggtggaggctcttgccgtcaccgaccagctcaatgactttgttgcactggccaccgtaatagtcgttggggttaccctgcagcttgacatttttaatagtaacgttttcgccgctgatggtaatgaagttctggttatgccagacgccgccctcagtcgcattgggacggacattgctggtgatcgtaacatcgccattgccaacaatggtcagattgctcacggtgatggggaacacaaagttcttctcaccattaattacgaaagcctcgttgttgtaaacttcttcgttgatgtagtaggtgcccgccgcaatgttccagatctggccatctgcctgattctggattgcattgatcaggtcagcgctgctgtcgatttcaacagttttgctttcctggggttcctcgtccagaacaaccggagtcaccgcatccggttcttcctcgtcggtcgtactggcaacactggtttcttccgtgctctcagtaccttcgtcttccgccaaagcggcaggtgccagggccgcggtcatggccgcagcgattagcagtgctgtcactctggtgcgcagattgttcagcttcatgcaattcacctttcctgtcaaaattcacttttctatgaaaaaagaggaacctcgctgttaaaactaagaccctttgctgttatatatcgctgtcgccatatataaaggatctttcgttttcccagaaaattcctccctctccagacttacaacataagacttaccaagtcttgccattgaattataactctcattatgtagtaattcaaggaacattctcacaaacttcctgcattttcctcaatttcctatatttttgtgatatgtacaaacaatttaagtatcctttttgttccttttgcataattaaaaaaccaatatttccctttgcagttttcctatctgttttgtaagattttttattttttacataaattttacatggataatatttattacgttcttttgcctttggctttgccggcaattttcacaccctcatgccaccgcaaccggcatacatataaaaatcggcagcgcaaaagtctcaaaattatccctccctgtgcggttgcgaaacagcctttgagcgggtatactgattgtggggttttgtaaccccacaggaggcaacgccatgaatgctgaaactttttgctttgacgggtcccggacctgtgatctggaccgcctgcccaccggggcaggcaaataccgcggccgcaagaacgaatttgcgccccggaccgccaacaatctaaaacagatggaagccttgcaggaagccctgtacgccgacgggcgggaggggcttatcatcctgctgcaggccctggacgccgcgggcaaggacggcaccgtcaagcatgtcatgggcgggctgaacccccagggcgttgaagtgcacaacttcaaggtccccaccgaggaggacctgcgtcacgattatctgtggcgggtcaaccgctgcctgcccccgcggggcggcattgccatcttcaaccgcagctactacgaggacgttctggtcgtgcggatgcacgagcttttccgcggctaccggatggctgaccgggtgctgaacgagtctgacgaggagtttttcaaaaagcgttaccgccagatccgggattacgaggaatatctgtatgaaaacagtttccgcgtggtcaagatcttcctgcacctgtccaaaaaagagcagaaaaagcgctttctggagcgcatcgacacgcccgaaaagaactggaagttttccgccgccgacatccgggagcggggccgttttgaggaatacaacaaactgtacgagcaagtcatcaacgcgacggccagccgacacagtccctggtatgtcctgcccgccgaccagaaatggtatacccggtatctggtctccgagattgtggtggatgcactgaaacagtgcgacccgaaatatcccgtcctgtccggggaggaaaaggcccagcttgtgaaagcccgggaacagctgatgagcgagcccgactgatcccatacgaaagagaggaaatgtcccatggcccccatccgggtcctgcagatcatgccggcaatggacgccggcggcatggagacgttcgtgatgaacgtttaccgtgccatagaccgcaccaaagtgcagtttgactttgtctatcactatgacaagccctgtttttacgatgacgagatcactgcgctgggcgggcatatcaccaaactaaccgtccgccaagacaacaacctgccccgctatttccgggctctggacgagctgttcgccgcaaatccgcagtaccgcatcgttcacgggcattacagcggcttcggcatgttttacaaccgtgttgccaagcgccggggtgttccggtgcgggtgggccatagccacaacaccgcctatgagcccaacctggtgggtaccctggaccgcatgatgagcagccgctttgaccatttgctcaccgaccgttttgcctgcagtgaaaaggcgggagaaatgcttttcggcaagcatccgtttaccgttttgcccaacggcatcccggtggagcgctttgcccatcctgacccggaagcccgcgccgccctgcgcgccgggtggggcgtaccggaaggttctcccctgctgggtcatgtagggcgtttttctgcccagaaaaaccacagcggactgctggatattttcgcggaagtccaccatcgctgccccgacgcccgtctgctcctgctgggcagcggcacactggaggccgacgcccgcgccaaagcccaggcactgggtctgagcgaggccgtcatctttgcgggggtgcgcagcgacactgccgcctgctactccgccatggacgcctttttgctgcccagcctgtttgagggccttcccgttgttctggtggaggcccagaccgcagggctgccctgctttgtgtccgacacggtggaccggggcgcggcctttgccgacggcgtacagtttttgcccctggactcccccgctgcctgggcggatgccctgtgcggggagcctctggtccgtaacgccaacgctctggcccaggcccgcaacgccgggtacgacgtacagacatcggcacagcggctgcaggaattttatctccggcgctacgccgaggtgacaggatgagggccgcgcgcattgccgtggtggtcccggtgtacaacgcggcagagtacctgcccctgtgcctggactccattgcggcccaaagcttttcccagttctgctgcgtattggccgacgacggttccaccgacggttcgggagacatctgcgatacatacgcccggcgtgacccccgcttttcggtgctgcacctgaaaaacggcggtgcggcagcggcccgggccgccggggtgcaggcggtatcctgcgagtacattgctttttgcgacgccgacgatttactgcatccgcagtttttgcagacgctgctccatgccgccgaggaaagcggcctgcccgtggcctgctgccggtatgacacctttaccgatgccccctccctcaacgcccccgcgccggagactttcaccgagctggaagacccccggcatctggaggcgcttctccacgatcaccgggtggattacagcctgtgcaacaagctgtacgatgccaacctgatgaagccggaatttctgaacaacggccttgcccacaacgaggacctgcttgccaactggcgggctttgctccttgcgccgggtatggcgttctgcgactttgcgggctaccactaccgccagcacgcagcctcgtccagccaccgcacgctgaccgtccgggagctcgacgaccaccgcgccgctgcggcggagatcctggcccaggcccccgaatctctgcggagcagtgccggggcattttactacgaaaaacttacctatctggtcacgcgcatcctgcggctgcccgcggatgccgccctcacccccgttttgcagcagctgaccgacgagctgcgccgcggggagcacgacccgcttcagggcggtaatcccgccctgccccgcgccatccgtatggcggcaggggcggcggtccatgctccctggctgctgcgccccgtctgccgcctgctgctgcgggaccgggcttgaccattttgtttttgtgcttgccgtattgctgaaaaaggagctttttgatgcgctttttattgattgtagacagtgtggaagcaccccaggccatcaaccccgaactgggccgccgcctggccgccgaactggccgggctggggcatcaggtccacctgctggagctgtgggacggcgagacgccgcctcccgctcccgccggggcaggcaccgccagtggcgtggtcctgcacgaccttgcctttgccgatgagcggatgatgaaccgagcactggaaaacggctcccgccagggcagccccatgccggtgcggctggcccgtctggcccggcatccctccgccatggaggccgccttccgccagctggtgctgcgccgcccccgccgtcaggaggacacccgccgggagatcgagcgcctggacgccatctatcactttgactatgtcaccgccgtggccgccccctaccgcgccgcctttgccctggaacaggcaaagatcgtgggcaaaaaggtgctgtggctcatggacccctacgccgccaaccggacctatcaggcccccggcggctgggcgcgagaattgcagctgctgcgctcggcggacacggtgtttgtcacccgtcaggccatgtccgactacgaaaacggccccctggccccctgccgggacaaggcctttgaactggcgtttcccgctctggtgccgcctcaggccgaaatttacgaccccaaccggggcgtgggtccgttggactgcgtcttttgcgggaccctgtatccgggcatccgcacgccggactttgccctggaactgttcaccaaactcaacagccccgatgtccgcctgaccatggtaggccgggggtgggaagccttctccgcccaggcagacgccgcccgcaaggcgctgggcagccgtgcgcagctttcggggccggtatccgccacccgggcgcgcacgctgaccgccggggcggacatcctgctcaatctgggcaacgccgtgagcaaccagatccccagcaaactgtttgaatatttcggcacgggcaagcccatcctgcatctctccccccgggaagatgacgccgtgctgccctatctcaagcggtatcctttggcccttgtcctgtcggagcaggagggtgtgacccccgacgtccttgcccggctgaacatctggctgcgggaaatgcgggggcagtcccttacctacgacaaggcggcggaactgttccccgagtttacccccgctgcggtggcgcagcgctttattgagatcatcacccggtgacccctgccggagaaaggacccctcccatgcccaagatcctatggcttgtcagcatcaccctgcccgaggccgccgcggcctgcgggctttccgccgctgaggtaggcggcggctggctgaccggtatgctggatgcgctggctcccgccgtggacctgaccgtctgcagtctggatgcccggacctcccagccgctgaggggaagccgggacggcgccgcctttgtggtgctgcccgccggttccgggtttgacgggctgctggaggaaggcggcttcgacctggtacatatctggggaaccgagtatcccgccgccgcggccatgcaggacgccgcccggcgccatggcctgccggtgctggtgggcattcagggcgtcatgaaggactgcgccgcccatctgtgtgacggtgtcccggaacggtatctccattcctgcgccgtgcagcggttcatcgaccgggtggtaccgggggcacttctggacgccatgcaggcgcggtttgacgctcttgcccaaagcgaggcttccctgctggccggggcgcgccatgtgaccggccgcaccacctttgaccgccgggcggtgagcgaactggccccccaggcggcctattaccgctgcaacgagacgctgcgccccgtctttgtgaacagccgggagctgtggcatccccgggaattcggccgcgggccggttttgctcatgagccagggcaactacccgctgaaaaacctgcacactctgttgcgcgccatgcccgccgtgctgcagcgctggccggacgcggtattgcgggtggcaggctggccgcctttggacaagggtcctctgctgcggccggtcattgactggatgttcccctatcaaagctactgcaaaacgctcatccgccagaacgggctgaccggccacgtggtctacaccggacctctgcccgccgaagccatgcgccgggcttttctggatgccgacctgtttgtgctgccctcttacagcgagaacagccccaacagtctgggcgaagccatgctgctgggcctgccctgtgtggcggctgcggcagggggtatccccgacatgacccaaggcggggccgaggcagttttgtacggcccgccgggagaccccgacgccctggccgaagccatctgcgcggtgctgtcccgccccgaccacggagctgccatgggacaggctgcccggcagcgcgccctcaccacccatgaccccgccgccaacgccgcccggatggcggagatctacgacgccgttctgaaggcggaaaaggagcccggaaatgtcaacgcctgaacttgcccccgtcagcgtcatcgtcccctgctataatgcggcggataccctgcgccgggcggtaaagagcatcctgaacggcgctccggacaatctggagcttttgctggtagacgacggttccaccgacggcacccctgccctgtgcgacgagctggccgccggggaccggcgcgtccgggcgctgcaccgcaaaaacggcggggcttcggcggcgcggaacaccggtctggatgccgctgccggcgactggatcgtattcgtggattccgacgacgtcctgcttcccggcctgtggcaggcgctgggggaagcctttgcagcggacccggggcttgttctgtttggcatcgaccgggccagcggtcccaatccctgccctctggcatcggggtattaccccgacccggccgctctgggcgaagcgctgcgccccctgctgtttgagagcgggtatctggccgccccctacggcaaggccttttccgcaaaagccctgcgcaatgccgggctgcgctttgacgaagccctgaaagtcaacgaagatgtgctgttcaacacagtttttttacaaaataccatttccattttctgcctgccgggtgtatactattaccaatatgaccaaaaggccgggtctttgtcccggcggctgcggggcgatctgctggatgctgagcgccgctgtgctcccgaactggagaccatgctgcggcgctgggggtaccctgccgggccgtatctgaaagaaagccgtctgcgggcctgtgtgaaccagtacgggcttttgaccggctgcaagggggacatgccttatgcccggcggcggactctgtttgccgagatcttgtcccagccggatgcccgcgccgccctgcgggagcagctgcggcgcgacgcccattccctgctggccctgccttaccggctgggcgtagggttggatctgccgggatttctggcggcatacacccttttgaaaaaccgttttctgtaatttgacttttgacgcccgcgggcgttttgaccgataatctacccaaggagcgaccgatgtccaatacccctagactcagcatcatcacaacggtatacgatgccaaagactacctgcccgccacggtgcagagcattctggcccagacctttgccgattttgagcttttgctggtggaggacggcagccccaacggctgcggcgagctgtgcgacgagctggcaaagcaggacgcccgtatccgggtgttccacaagcccaacggcggccccgcatcggcggcaaacgtcggactggaaaacgcccgggggaattacatcgggtttgtggattccgacgacctgatcgagccggacatgtacgcccggctgttcgccgccctggaggcgcaccccggtgcacggctggccgcctgtgccggcgacgccattgacgacaagggccggaccattcccggtcagaaggtggcctgctccattaccggcgagtgcaacgccatggacctgctgctggaaacctttaagaccggcagtttctacgggcctctgagctggaacaaactgtttgacgcccggcttttccgggacaaaaatatccgctatgacgagagcatgtttttcggcgacgacgccagcgtgctgcatcttgtttttgagggggaacgggccgtctgcctggcagacgctctgtaccactaccgcacccgcgccggacagatgaccggggccgtttttccgccccgcaagctggacgacctgcggatgtactgggactggctgagttattttgcggcaaggccggattccgaggaatactaccagtgggcggttgcctggtactggaaagttttctatcatttctgggtcatgtccggcgaggcaggaaaccttgcccagctcaagcccggatttctgaaacacaaaaagcatctggacagcctgctgcccgacattctgcggtgtccgcacatcgcggcgggcgaaaaggcacgcgcggtcctgttcattgccagccctgtgctgacctggaaaatggcccgcgcgtggggacggctttgcagatttggaaggggttaaaactatggaacgtatctgtgtgagcgtgatcattccgatctacaacaccaaaacctggctggaggagtgcatccgcagcgtcctggaccagaaattcgaccagacctttgaggtcatccttgtggacgacggctccaccgacggctgcggggatctgtgcgatcagtttgccgcccaggacgaccgtgtccgggtcatccatcaggagaaccagggcctgtccgccgcgcgcaataccggcatcgacgctgcccagggccgctactatgcctttgtggactcggacgacattctgcgtcccgcctacctgcagacgctcttcgacgcctgcgaaaagcacgacgcctacatggccatctgcgccgtggaggacgtgcgggaggatggttccagcgaggaaccgcccgcttacaccatgcccagcgaggtcggcgtctttaccggcaaggatctgctcaaccgtttttacgccgccaacggcacctactataccgttgcctggaacaagctctaccgcgccgaagtgtggaagcttctccactatcccgaaggccgcctgcacgaggatgactttgtggcccaccgcctgttctggcgctgtgacaaggtggtctgtctggacgatcagctctactgctaccgcctgcgcagcggcagcatctgccgcaccaacatcaagcccgaggcctttgacgccgtggacggcctggccgaccgctaccgcttctttgtggaaaacggcgccgaccgcaccgtcatcgactgcgcctatgcagcctgctggcggcggtatctgttcctgtgcgccaaggtgcgccagtccccggagcctgccctggtcaaggcgatctccaaggagcagtttttgatgcaggggctcatcagctacctgcccaactgcaaacagctgaaaatgaccgagaaactgtcggccgcccgctggtccatgatgcccgcggaaagcctttgccctgcgaaaaagtaatctttgtgtgaggaggcccggccgtgccgcttgtcaagccggacaaaaaaaccgaaaagcgtccccgcgtgctgctgatcccccctgccgatctgccggtccctgccgtgcacggcggcgcggtggagacgctcatcacccatctgatacgggaaaacgagcgccagggaaagctggatcttttgtgcgccagcgtcctggaccctgacgccaaggccgccgcggcggatctgcatcataccaaaatgatgtacattgcccgcccccggggacaccggcgctactggccccttgtattcatcgaacggtgcttcggcattgctgccccctatgagccgtggtatcagaaggtccagctgtctctggcgctggagcttcccccgcccgactggatcattgccgagggcggcaacctgacccagtgcagcgccatcagccgcatgttcggccgcaagcgctgtctggcccatctccacgggctgacccagtgcagccgccagatggacgacatctacggcggtgtgctggccttaagcgagtttatccgggacgagtatctgaaaaccagtaccctggaccgcaaaaacgcctttatcctgcacaactgcattgataccgaccgtttcacccccggtgaacccgacgccaagctgcgtgcttccctcggtttcgcgccggaggattttgttgtgctgttctgcgggcggctggaaccggacaagggcatccacaagctgctggaggccatcacttccctgaccgatccccgcatcaagctgctgatcgtgggcagcccgtttttcgggcggacccagtccagtcctttcctgaaaaagctggagacccaggcccgggcattgggcaaccgtgtacagttcaccggttttatccagaacgatgctctgcctgactattaccgtctggcagaccttgtctgcgtccccaccatggtgcaggaggcggcgggtctggtcgccattgaggccatggcctgcggccggccggtgctggctacccgctccggcggcatgccggaatacctggccggaagccaggccgtgctggtggacctgaaccgcgacgtggccgggcagcttgcctgggccattgagatgctgcgcgaccatcccgagctgcgcgccgagatgggccgcgccggagccgaggctgccaaacggttctcggtggcagcattctatgatgattttgtccgcatcctgaccgaaatgggggaacgcacatgaagcccgccgtctgcgtcatcgtgccggtatacaaggccgtgcacaccctggaccgctgcgtcgagagcatcctgacccaggaagttcccggcgacatctcctgcattttggtggacgacggcagccccgatgaatcgggggccatgtgcgacgcctgggccgccaaggactctcgcgtccgggtcatccaccaggaggacggcggtgtatccagcgcccgcaacgccgggttggaacttgccgacgccgagtacatcgtctttctcgactccgacgatgctttgcgggaaggcgcgctggaagccgccctcaccgcccagcaggaacaccccgacagctttgtgatctggcactacaccaccgatcttttggacgacgcccccacccagggggaggttgccctccgccctgcctcggctctggcaaggctgtatctggactgcctgatcgccatgccgtggaacaagctctaccgcggcgacctgttgcggcagctccgtttcgacgaatcgtatactttgggagaagatttacagtttgtactggattatatcacctgtctcaataaagaacgtaccaactggaattttacggtgctggatgccccgctgacctggtacaactgcgataccaccggcaccagtctgtccacccgctaccacgacgattactgcgacatctggccccggcactttgccaagctgaacgccgcctgcgacgctgtaaacgcaccggaggaggatcttctgcccctgcaccgggcagagctcaccgtcctggccgagggcgcggcggacattctgcggcgggacccgtcccctgccgggctgcgccgggacaaggccgtcaaggcgctgtccggggcctggctgcgggaactgctgaaaaccatgcgccgggagaaaaactattccgcctactatctgccggtgtggtggcgcaacctgcatctgctgtactccatggcagaagccaagcgcctgaacaagccactgtacggcaaggtggactggctgggctattacctgttcctgggccgccgccgcagagagtgaccttcccctcctgtccgccgtatgcggtctttttggacgcggcctggcaggcacttgccgggaaaacatttccgtgctatccccgctactgtccgtttttgcggcaggcccccctgcacagggtgttttgacactttccacattgctcataaaaaactcgatacagcatcaccgccgtccggtcattacgggtccgggcggcttttttgtgtaaaattttgcatagggcttgatttatgacggcatactgagtatgataggcatagaggatgttagcattatgcaactaaagtttgcatgtgcaaattcattgcttttcaacacttcggaaaggaaggttttcttatgagctatcttgagatcgaacaggtcatcgggcgcgagatcattgactcccgcggcaatcccaccgtagaggcggaagtccgcctggccgacggcaccgttgcccggggcgcggcccccagcggcgcttccaccggcgaattcgaggccctggagctgcgggacggtgacgccgcccgctacggtggcaagggcgtgtctaaggctgtggagaacatcaacaccgtcatcaacgagacgctgaccggtatggatgcctctgacatctacgccgtggaccgcgccatgatcgccgccgacggcaccagggacaagtcccgtctgggtgccaacgccattctggcagtctccattgcctgcgcccgggcagcggccacctccctggacattcctctctaccgttttctgggcggcatcgcgggcaacaaactgcccgtccccatgatgaacattctgaacggcggcgcccatgccgccaacacggtggacgtgcaggagttcatgatcatgcccgcgggtgcttcttccttccgggagggtctgcgctggtgcaccgaggtgttccacgccctgcagagcctgctcaaggccaagggcctgaccacctcggtgggcgacgagggcggctttgcccccgaccttgccagcgacgaggaagccatcgagtatatcctggaagccatccgcaaggcgggctatgagccgggcaaggatttcgttctggccatggatgccgcgtccagcgaatggaaaactggcgaaaaaggtcgctacaagctgcccaagtgcggcaaggagttcacctctgccgaactggtggagcactggaaagccctggtggacaagtaccccatctactccatcgaggacggtctggacgaggaggactgggagggctggcagctcctgacccgggagctgggcggccgtgtccagctggttggcgacgacctgttcgtcaccaacaccgagcgcctggccaagggcattgagctgggctgcggcaattccatcctgatcaagcttaaccagatcggctcggtgtccgagacgctggaggccatcaagatggctcacaaggccggatacacggccatttcctcccaccgttccggcgagacggaggacaccaccatcgccgacctggccgtggctctcaacacctgccagatcaagaccggcgcccccagccgcagcgagcgggtggccaagtacaaccagctgctccgcatcgaggaggaactgggcgacggtgcggtatatccgggcttcggcgcgttcaacatcaaacgctgaccggtttccacagcattttccgccataacacagtcaataccgggagtcccctgcatcgggggctcccggtttgttttatcctttttcgggttcaatagagaggatgccgggcacgccgagcacctttgccagactgcccggcagccgtcaaaatcgccgaagatgttccgccgccggaggctccggaaacgccgttccgcaaaaggtcacacagcggattgtttctgcgtttcattcccttcaaaaccgtactttttccgcgccgaaccgcccgaaaaacagcccggatttttcgccgtccggggagggggcagatttgtaatttcatgccattcatggtacaataggcgtgtatatgaatttttgtgaaagtacaggtaatgaaactatggcggaacatctgcagaccaacgcctccaacggcgaatggaccaccatcatccgtccccgcaccggctggtttgacatcgacctgcaggagctttggcactatcgtgatcttgtggttctgtttgtcaaacgcaactttgctgtgctgtacaaacagaccattctgggcccggcatgggtgcttctcaatccgctgctgaccagcgtcttgttcaacgtggtgttcggcggtatcgcgggactttccaccgacggcaccccctctttcctgttttacatggcaggcaataccgtctggactttcttttccagctgcatcaataacaccgccaacacctttgtggcaaacagtcaggtgttcggcaaggtgtattttccccgtctgaccatgcccatcagccaggcactgaccagcctgatcaacttcctgatccaggcggccatgttcgttctgttctggatctatttctgggcgaccggttcggacatccacctgaccgcctggatgtgggcggtgccgctggtgctgatccagaccatgctgctgggcctgggcgtgggcatcatcgtgtccagcctgaccaccaagtaccgcgacctggccattgccgtcagcttcggcgtgcagctgtggatgtatgtgtcccccgtggtctaccccctgtccacccttggggaaagcccgcgcctcgcctttttgatgcgtctcaatcccatgaccgcccccatcgagatcttccgcaccgctaccctgggtaccggctcggctgacatggggatgttcgtgtacagtctggtgttcaccgccgccgccctggttctgggcgtggtgctgttcagccggatcgaaaaaacctttatggacacggtgtaagggggcagctatggcatcgaacaacaaaacgcccgtcattcaggtgacggggctgaaaaagcagtataaactcggccagatcggcggcggcaccctgacccacgatctccagagctggtgggcccgtgtccgcggcaaggaggaccccaacaccgtcatcggcaccgacacccgtctgttcggtcagaccttcatggcgctgaacggcgtggacctgaccgtctatcagggggaagccctgggcatcatcggccgcaacggtgccggcaaatccaccctgctcaagatcctctcccgcatcaccgcccccaccgagggcgagatccggctcaagggccgggtggccagcatgctggaggtaggcaccggcttcaacaacgagatgaccggccgggaaaacatctacatgaacggcgccatcctgggcatgaccaaggccgaggtggacgccaaactggaccagatcattgaattctccgagtgcggggacttcatcgacacccccgtcaagcggtattccagcggcatgttcgtcaagctggccttcgccgtggcggcccatctggacagcgagatcatggtcatggacgaggtcctggccgtgggcgacatgaagttccagcagaaatgcctgggcaaaatgagcgacgtggccggccaggaaggccgtaccgtcctgtatgtcagccacaacatgtccaccatccgccagctgtgcacccgctgcgtggtgctggacaagggccgcgtcatctttgacggtgacgtggagcaggccattgccgtttacatggacactaccgacgtcaacgtggtccactacgacctggccgacgtttcccgcatgaaccagagcgcgggcaagcggctgcggctggagaccctggactttgtgggcaaggaatccagcgtgtttgccgacaccgagaaaatgcgggttcgcatcacctggcgggtatccgagccttttgccggggtgcacatgaagatgaacctgcattaccgggattcctcccccgtgggcatcacccatcccgtggacctgggcgaggcacagcccggcaaactgtacgtttccgagtttgagtttgacccgtcactgctgggcgagggccagtatttcttctatctggacatctttgacggtgctctggcccaagcggtctgcctggacaagccggtcaccgaatttgcctttgaggtcaccagcggcgacctgtccatgcccgagtgggcctccggctggggccgcatccacttcccgccggtcaaggtgctgacttcgggcgcggagggctgaccatggcaaagcccgatctctacatctgccacaccgcctatcacctgctcatcgccgttgtgcgtgctctgcgggcggggggcggtcaggctgtctggctgagcgaggagcttcccaacgcccaggccctggcggactctcacaagctggacggcatcttttcggaggtctgcgtcctgcacgagtcccgctggcagggcgtcgtcaccggcccctttgcccatgcccgcaaccgccgggcttacgagaaagccggtgtgggcacggtcctgggcaagcatgcctaccgcaacatttatatcagcaacgactggagcgtggcgggccgctatttgcaggactgccgcgccccctatatcctttgcgaggacacggtgggcggtactctcgaccccgaccagcatcttttggacgagcagcgggctgcaccggatttcgctgcccggcaaaagggccaggggtatctctactggggcgacagtcctgtctgccgcgccgtggagagcgaggatgcttcccggtgcgtcatctttccgccggaaaagctgctgactttctccaaagcggaactgctggccgggctgaccgacgaggaaaaggccgtcgtgcggggtgttttcctgacaaagcccctgcccgatgacccggaggtattctcccgggcgacccttttgctgccccgcagttttgtggacgacggtcacatggaccaggatacccaggaccggatgtttgcagccgtggcaaggcagtacgccgacgggccgctgttcatcaagacccaccctcgggacaccaccgactacggagcgttgttccccaacgcggtggtgctggaacgcaccatgcccagtgaagtgctgaacttctgcctgccgggcaagttccgccgggcggtcacggtgcagagctgggtactgcggggctttaccgcagcggaggagaacattttcctctcgctggaggatgccctggcattgatcgattgacctgtatccccctttctctcttcactttcggaaaggacggcgagtgtatgttctggcacaaggcacagcgttttttcgccatcgccatgggcgcatttttcggggtgttcctgggctattgcctgtggacggcctgggaccatgccgcccgccccgaactgtacgccatgaactccgccccctggtgggtgggtgttctgctctacggcgtctgctgcgccgtgtgcgaagtggtcctgctggcctgctggctgtttgcccgttcccgggcgcgcaggacttctccctccgggcaaaatagagagactggggaaaaataacaagatcccggcaaggcatctgccgtgcaggcagcatgccgagacgaaccgggcggcacctaaccagggccgtccctcacaccgtccgccgggcggaaaggatgtttctgccatgaaaaccattgctgtcatccccgcgcgttatcagagttcccgcatgccgggcaaacctctggccgatattctgggccgtcccatgatctggtgggtctggcgcgaagccaaaaagtgcgctgccctggacggcgtcgtcattgccaccgacgatgagcgcatcgccgaagcctgccgcaagtacggcatggaatactgcatgaccagccccgaccacgacacccctaccgggcgtatctgggaagtgagcaccaagttggaggccgacctgtatctgcaggtcatgggggacgaacccctcatcaacgtgaaggccttcgacctgatcctgcccaaggaacagcccgacgatccctactatgtggctgtactgaccaatgtcatggagcaccccgccgacgtcatcgacttttccaatcagaaggtcgtgaccaacgcggcccgggagattttgatgatctcccgcagtcctatcccctaccccaagggaaccctggactttgagtatgagaaagtcaccggcatccagctgtacagccgtcaggccctggctttctaccacgacacccccaaatcccttttggagcgtgccgaggaaaacgacatgatgcgctttatcgaaaacgggcacaaggtgcatgccatcgtcagcccgtacaagaccgtcagcgtcgacacccccaaagatcttaccctggtggcccgcatcctgaccgagcgcggcgtcactgttgaggaataaacacaacgaaccgcagtttttctgccaaaaaggaggtattgcctatgggcgacatcaaactgctcgactgcacgctgcgcgacggcggctacgtcaatgactggaagtggggattttcccccgcacgggatatcatccgtaccctgacccgggccggggtagatattgtggaggtcggttttctgcgcaatgtggaaggctatgaccccgacgtctcggtctgcaacaccatcgaggaactcaaccgtctgctgcccgacgatccccggaataccatctactccggcatggcaatgcgctccaactatgacatccgcaaattgtcggagtatcagggcaagggcattgagatgatccgcatcacagcccacgactacgacatccgcgacggcatggactttgcccgggaggtcaaagcccggggctacaaactgtccatcaaccccatcaacatcatgggctacgcagacaaggacatcctgtggatcctggatcaggtcaacgccatcatgccctatcagttttccattgtggacaccttcggcagcatgcgccgccgcgatctggagcgcatcgtcagtctggtggaccacaaccttgacccgtccatccgggtggggctgcatctccacgaaaacatggcgctgagcttctgcctggcccaggaattcatcgacaagcacctggcccgggacatcaccgtggacgccagtctcatgggcatgggccgtattcccggcaacctgcccattgagctgaccgccgactacatgaacgagacctgcggcagccattacgacatcgacgagctgatggacgccattcaggaccatattgctcccatcaagggccagcccgaatggggctacaccccggcctatttcctgtcggcccggtacaatctgcaccgcaactacgccgagcattacctggccaagggcgatctgaccaaccgggacatcaaccacatcctgtcggtgctggaccgctccaaggccaccgcctttgacaaggcgtatgccgaccagctctaccgggaataccagagccgccagatcgacgacaccgccgccatgcagcagctgacccaggcctttgccggccgccgtgtgctggtgctggctcccggcgccactctggccgatcctgacacccaggccaggctgaacgccctacgcggcagcgaggcagacctggtggtctcggccaacttcctgccggaattcatgacaccggactttgctttcttcaccaacagcaagcgtctggacaagatcaccgctttcccctgccccgcggtgctgacttccaacctgcgccccgacgttgccccggctgactgccacaccgtcaactacaaccgggtggcgggcgcctttgcccagggcggcaacagcgtggtcatgctgctgcggctgctgtccctgtgcggcgccaaggctgtgctgctggccggtgccgatggctatcccgccggtaagcccgcctacgcggacgccagcctgcacgcccacaccgggcgggatcacgccttccacacggccatggcggaagccatccgcacggcgggcatcccggtgacttttgtcacccccagcgcctatgaaaacgcctgaaccggcgtggaaactgcaatactgaacaaaggacgtgatggcatgatccgcctgctgatactggacgtggacggcaccatgacagacggcggcgtctactatgacgcttccggcaacgaactgaagaaatttgcgatcaaggacggggctgccatcgtgctggcccgggcggcgggcatccaggtgatgatctgcaccgggcgggagtgcgaggccgtgcgccgccgggcgaccgagctgcacgtggatcatctgtaccagaatgtctccgacaaggcgggctttctggggcagtttctggccgagcacggctttgcccgggaggaagttgcctactgcggtgacgacctgaacgacctgggcgccatggccctgtgcggctttgtagcctgccccgccgatgccagtcccgaggtcctggcccgcgccgactgccgctgcccccagaaaggcggcgaaggctgcgtgcgcggcgccgtggaagccattctgcgccgggacggccgttgggccggggcggtgcgcaaggcgttcggcgttacgttggaaaccggctgcggccgttgacaggagcaggcatgacatcactgaaaccgttttttcaaaaacaccggcacaccctcgttgcccttggggcggcggcggtgtgctttgccatttttcttctgtgctggttcgtctccatccggggactgggcaccaaggcattatccagcaaggtaagcgacgattactccgcctaccttcccatggaggacagtgtcagccagagctttgtctttgacgaggatctgctggccatggcctttgtgttcggcatcgagggggagcagccttccggcaccatcgacctggtattgaccgacgccgacaccggcgaggtccttgcccaaagccagggcgtgatggacaacattctgcccgggcagtacaccggcctgggtctggacaccgccgtcgcaggcacggaaggccggcactatcttgtgacgctgaccccccactacgaaggcagcgggcggctgagcatcggctgctccgccacggcgaccctctggcaggaaacgctgacggtagacggccaaacccaggacgctactgccgccctgctggtgacctaccggcagatcggcggatttctgacacggtattactggctgatctgtctggtgctcctggccatcgtctttttcggggtgcggtcggccctgcgccgccgggtggctctgcaccggctggtgtttgcgctgatcctggccctgggcgtggcctacaccatggtattgcccccctacggcgcccccgatgaaaaataccacatcaaccagtcctttaccctggcctgccgctgggccaatgtcttttcctcagaggactgggacatggggcacgtgcccatcaacatgagctaccgccgggagcacgactttgacaccgttttgcaggaccaggaggagcacaccaccgtctggacctggcaggcctttgccgacggcatctttaccctgtcccccgacgactttgacagccacacggccctggaggaagcccagaccgactccaatcccatcctctacctgcccagtgcggcggcagtatttgtgggctttttgctccatctgggctttgtaccggtgctggttttggggcggctggcaaaccttgtctgctttgcggtgctggcggcagcggcggtgcgttttgccccctttggatgccggatctttgccgccgtggcccttttgcccatgacgctccatctggcggcgtccttctcccgggatgccctgctgctggggttgtgttttgtctttacttccctctgcctgcgggccgcctttggggagaaggcccccggccgcgctctgctcattgccattgccgctgccgggctgctgttctgccccggcaaggcagtgtatctgccgctggccgcgctggttctgctgattccctctaaacggctggccctgccccggcctgtgctctggaaagcgggttacctggccgcctgcgtggttgtgaccctctgcatgaacggttccatgctccgcttcgcggtgtccggtgacagccagcaggctgcagctgccgatgggcaggagaccgtccagatgcaggaaagctccgccgccgaaaccgaggcggcccccgccgttcacggcgctccctccgccggggaggatacttccggcgccaccggggatgccggcacatcggtgggtctttccggggacgagtccgccgcggaaagcgccctgaccatccgggaggatctaacggaaaacacggtggagaactatgtccgccgcctgttctggtacgtggagggcacggaggagcctcccgcggcggaggtcaccttctgggcagacgccctgcaaagcggcgatgtgaccgccgccatgctggctcagagctttttcttcagcccggaagagatggagacctcctccctgtcggatgaggattacatccgcgcgctgtatctctgcctgctggaccgcgcccccaccgatgacgagatggcgggccagttgtccaccctgcaggggtatggacgggtcatgtgcttcaaggtcgtctattctcattctgaggccatcagcctgttggaaagctacggcgtgacaatgggcatcgaggacgacacccgctatcccatggaccgggaagaactggcacaggacgccgaggcggcagccgccgtgcgggaaaaccagagcatcgccaccggtgacgacgccatctgctatacccccggctatatcctgtcccatcccgtggataccctgcgcctgctggtgcgcaccgtcattgaaaacaccgaccactacatccgtaccctggtcggcggaagcctgggctactataccctggatctggcctggggctgggtgatcgtgctctatctgctgctggcctgggccatgctgcccgccgccgaccatccccttgccgggcggatgcgcgccggagcctttgtcctggtattgctgtgctgcgccctctcggtagctggatgcctgacctggacgcccacctattccgagacactgtatggactgcagggacggtatttcctgcctgtcctgcctctgggcctgctttgcctggccccccgccgcatccgtgtttccgacactgcccgggctgagtccggccttgtctgtgccctgtgcctggccaatgccggtgtgctgctcaacgccatgctggccgtcgtcgcccaataaccgtccacccggagggatcttgtcttgaccatctgctttttttccgcgcaatacctgcccacaccgggcggagtggagcgctatacctggaatatggcccggcgtgctgtccgggccgggcatcgcgccgtggtcgtgaccagcgccctgccgggtctgccggaacacgagaccgacgccgacggcattgagatcatccgcctgccggtctggccggtgatgaacggacggttcccggtgctgaagttcggacggcggcaccgtgccgctgtgcgggcgctgtttgaccatcccattgacctgtgcgtcatccagacccgcatgtatactcaaagcgtatgggctgcctttgctgcgtccaaacggcacattcccaccgtagtcatcgaccactccactggctatatgcccatgggcggcggtgttctgggcctggcggggcggatgtacgaacatcttgcctgcgcccttatcaaaagtacaaaaccaaccttttacggcgtttccctggccagctgccgctggctggcgacctttggcatccgccccaaggacaccatgcccaacgccatcgacccggaggcccttgccgccgaactggcccagccgtgcggcgaaggcctttcccgtaaagacctctgccccaacggggaaaagctggtggtttttgtggggcgaatgatccccgaaaaagggattcaggagctgatcgatgccgtgcgcggcctgcccggcgtggtactggccgccgccggggacggccctctgctcccccaactgcgccagcagtatggagacacgccgggcatctgtctgacggggcctcttgaccatggggacattgtgcggctgctggggcaggcggactgctactgcctgcccacccgctatgctgagggcctgcccaccaccctgctggaagccgcgggctgcggctgtcccatcctgtgcacccccacagccgggaccgaggaactgctgcccggcgacagcgccgtctttttgccggataccacgccggaagccatctgcaccgggctgcaaaaggtattagaccatcccgatgccgcccatgaacgggccgtccgggcccgagaaaacacccttgcacactttacatgggacgcggtgtttgataaactgatacagaacaggtaaatccttcattccatcccaatacgtctcttgcgcgggcggagcttgccgccgggcgcagaaggagccaagatgtctaaattattgatcgtcatccccgcccacaacgaggaggaaaatatcgtccgcgtggtgcgcgagctgatctcaaaatatccgcagtatgattatgtggtcgtcaacgacggcagccgtgacaagactgccgccctctgccgggccaacgggttccgcctcatcgatctgcccatcaacctgggattggcgggtgccttccagaccggtctgcgctacgccgccgaaaacggctacgactgtgccatgcagctggatgccgacggccagcacaaacccgaatacatcgaacctatgctggccgaactggaggatggtgccgacattgtcatcggcagccgttttctgaccgtgaaaaagcccaagaccctgcggatgctgggcagttatatcatcagctggtccatccgcctgaccacggggcgcgccatctgcgaccccacctccggcatgcggatgttcaaccgcgccatggtggaggaatttgcccagaacctcaactacggccccgagccggataccatcagctatctgatcaagaacggcgccaccgtcaaggaagtccaggtggaaatgggcgagcgcgttgccgggcagagctatctgaacctgtggaacagcgtccagtatatggtcaaaatgtccatctccattttgctgatccagtggttccgcaagcgcgacaccgagaccccgtattcccaaaggaggacctgagtcatgttagatcagcctatcatccgggcctgcctgatcatcggcagcctgatcactgccttcatcgtcctgcgccgtgtgcgtcaggccaaggtccagatcgaagatacgattttctggttggcggcatcggcagtgctgctgatcctggccatcttccccggcatcgccttctgggcttcccgtctgctgggatttgtcagccccatcaactttgtctacatcgtcatcattttcctgctcatcgtcaagcagttcttcatgtccatccgcctgagccagctggattccaaggtccgcatcctgacccagcgcatcgctttgaatgaggaaaaggccgagcgtgacaaattggatttgtaaagttgtctcaaacctgatataataactatgattcgtctgatctgcgcgcagctgcccccggcgccgtgcgctgtctatacaggaaggaaggttgtgacccctatggcattcactccgaaattgacctacaaaggccgcccgctggttcgctgcggcaatgacatttactacggctctctcaaagatccctacgtgatctatcttcaggtcctgaccaccaaaaaggaaaaggacgttgaggttgctgacaaggtccacatcgttctgctggataccgattcctccaaggcgttgcccgagcgtattgtccgccaggcgaataaggttggcctgttcaatgctctgtccttcggcgacatcatgctgcgcagccagatgaagggcaaagcctgagcgtttttcaccccacggttcccccaaaaagacagcaggcgcttctccccccatgatcggggcgcagaagcgcctgcttttttgtttgtatcaatttcactgatcagtaaatgggggcatggccgatgaaggccgcaaaatagatagcccagaaaaccgccagaacagccagcaacacggtacgcacccaacgcttttccgacagggctgtcacggcacagggcagcgcgggcattcccaacgcataccgctgggcgctgataagccaggtctggccgttcatcatcaatacccctgccaggcccagcagcagccagtccgggcgcagtttcttggcagccagaacataaacaaggatctccagcaggatgaccgccaccgtccacaagccgatatagatgcccagagacgactcgaagtctgcatagcggcacatattgacgatggcctgtgggaacaggcagaagctgtgatgccagtgctcctgctggtagatggtgaactggaacgcgttgccgtagaccttccagttgagaagcagatatacgagaatccccacggcggggccgatcatcggcagcagccaggcggggcggagtttttctttccggcgaagagccagcaccgcccaggccacggcgtaccctgccagcaggatgccatttgcccggcagagagccgccagcaggccgaacacgcctgcctgccccagcctgcggcgctgcatggcgtccagaaaggcaaaattcagaaagtaaaacaaagcttccgtctggggcagaacaaagaagaagctgcccggcattgccagctgcaccgcgcaggcaaagcccgccgtgcgccggttccccgtcaggcggaaggcacagcggtacaaaagcacggtcccggctgccgtcagcagcatggcaagcacggtgcccaccagccacaggtccgcccccagcaatgcaaagggccgcagcagccagccccacaacgggaaaaagacgatcatcaggtattgctcggcaaagccttcctccgacgcgccgtagccccattgggcgaggtccagataatgccgggcatccaatccgccgcagagtgcgctgcgcaccgcctccagcggggagagctccggctgctggagccatgccgccatgcaaagggcggtcagcatgaccgcacaccagagcagtgccgcaccaaaaacaaggcgctgggccggggcctttccacgggcagcaggttcccgggcgggggctttgccgaacaggcgcagcacgccctgtcccagagcatacagaaagcccactgccgcagcggcggccagcagcatagatacaggcatcgcgttttccccctcccctgtcagttttatctgattatagcacaggcagagaatcaagtccacgcatcgtctgccggcacagatgtggtggcgccctgtcccgcacgcaaaaacgcccccgcagggccggatataccgggccttgcggggggcgtaactgtgttttgtttgccttattcgatggggatctcgcgatccttgggcagggcggcggagtcatcctcctcgtcctctgccagttcaacaccgaaagaagcgccgcagttggggcagaccagctcgtcgccgagcagagcatcctcgtccacggtggtgacctcaccgcagttggggcaggtcacttcatacatggcatcctcgtcgtcggactcctcgtcctcatcgtcaacgtcaaagacaacgttgatgaggtcggtcagatcctcgtcgatggtgtccacatcctcgtacagctgatcgagcgcattgtcctgctcggtcacggtggaggccatctcctccagcagatccatcatcgcagcgatgatcttaccgtttttggagttggcgtcaaattccataccggacatcagcccacggatgtacgcagcttttgcattgagatccattgccataatggttccctccttatgatgagcggcggcgccgcccagtgtcagccgtcacgatctcagcagacagagatcagacgcgctccatatactcgccggtgcgggtgtcgatgcggatcttgtcgccctcgttgatgaacagggggacgcggatctcggcaccggtctcaaccttggcgggcttcagggtgttggtagcggtgttgcccttgaagccgggctcggtctcggtgatctcgagctcgatgaagttggggatttcgacgctgaaaaccttgcccttgtaggacagcagcttgcaaacctcgttctccttgcagaacttgaagttatcgggcacgtcggcagcgttgaccgggatatcgtcgtaggtctcgttgtccatgaagtggtacaggtcgccgtcagcgtagctgtaggtcacttccttgcgctcgatgaacgcctgggggaacttggcagtggggttgtagctggtttcggtaacagcgccggtgatgacgttcttggtcttggtgcgcacgaaagcagcgcccttgccgggcttgacgtgctggaactcgacgacctgaaggacctggccgtcctgttcaaaagtaacaccgttacggaactcgcctgcagagatcatatagaaaactcctccattaattagaattcaagcatacctgtagttattttacccgaaactgtgcgccgttgcaagccctgcgcccggttttcgggcccaaaatgcggaaaattccgtgattttgggcaatttttgcgttgtattgccgtcctcaggcctgatggtaggcctgcatcagcgtccgggcgtcctccgcctgagtgcctgccgactcacagatgatggtcggtgccagcccccgctgtttgagaagctgcatcagcggctggtggggcgggccgaactcggtgtcctcaaaggtgaggtggcacttttccccgcctgcggtgtaggcaatgcgggagaaatgagaatgaaaatgcaccgcccggtcatcccccagggcctcggccatgcggtcaaggatggccgcatagtccgactccccggtgatgccgccgtgggtccgggcgtacagatggccaaagtcgatgcagggggtgatgcggtcatccacgctgcacagggccagcacctcgtccagggtccccagctgattcaccttgcccatggtttccggacaaaggatgcagtcgccgaaccctgcggcgtccaccgcttccacggcgcagcgcatggtatccagggctttttccagggcggcttcccggctctgcttgccgcagctgcccgcgtggaaaatgacccggcgtccgcccagcgccttgaccagcgcgcagctttgcagcaggtaatccacgctgtgcaggcgcttttcctcctccatgctactcatgctgatatagtagggcgcatggaccgacaaggcgatgtccttctcagcgcactgggcacccaggactgccgccttgtccagcggcatacgaacgccccggccgcactgaacctcaaaagccgtcaggccaaacccggcatggtaggcggcaatgtcccgggggcttttgaacccggaggcggcaaagctgtccgacaggccggctgcaccgaagcggggctggtcactcatacagggtccctcccttttgatagtacttgcggatgaacggcggctcaaacttgcgcttgaaccggacacccctggatttgtcgtggggggtgcggggcatgacgtacaggcagcggatgccgaacagccccgcggccagacggtcggtgtagatctggtcccccaccatggccatctggtccttgcccacgcccagccggcgacgggccaccatcagacccacaggcagcggcttgcaggccagaggcacccaggccaggccgatgcgctccgcaaagggacgcacccgcctggcggtgttattggacacaatggtcaggctgacgcccgcggcacgcatggtatccagccaggcggccacaccgtcgtccagctgctggctgccgtccccggtcagggtattgtccacgtccagtaccagggcgcagatgccccgttcccgcaggaagtccggcgtgatggcttccacatttttgaagatgtattccggtgtgagcagcatggcgatatgtccccctttcgcgggcggcgatggtatttcttgtgtgatcttggcaggggcgggatgcaccctgcaataaaaaagcaggcccgacacgcgggcctgcttagccgttgacgttacacgtcagctcatgcaggcaaattgcttacttgaacttacgcttgcgggcggcttcggacttcttcttgcggcgcacggacggcttctcgtaagcctcgcgcttgcgcacctcggcgagcacaccgctgcgagcggtgctgcgcttgaaccggcgcagggcgctctcaagggattcgccctctttgacacggatctccgacatcttgctttccctcccttggcctatgacaggagtttgccggtcgttttttcagcatctgcgcggcaggtacttgacctgacagtctcatacaagaccatccgggaagcgcctttttccacgcttgctactagtcaaccagtattgtcaattatactataatgtgtgtgaaaatgtcaaccgtcttttcccttgcggggcgattgttcacaatttgttcagcttatcccttggcggccaggttgaccagcttgcccttgacgtagatctccttgaccagggtcttgcccgccagagcttcctgaacggcgggttccgccttggcgcgggcgatggcgtcggcctgctcgatgtcggcagggaccttgatgcgggccttgaccttgccgttgacctgcaccgcgatctcgatggtctgctccacgcacttggcttcgtcgtaggagggccaggggtaataggccagctgttcggtgtggcccagctgctgccacatttcctcggtcatgtggggcgcgaaggggttgagcagctgcagcagcacttccagctcggcacgggtggcgccgccgttgtcatacagcgcgttaacatagatcatcagctgggcaatggcggtgttggccttgagggcatcgatgtcctcgcccaccttcttgatggtgcggtgaacggtggcttccagctcgggacggtagccctcgccctcgacgatcttgtcgcccaggccccagatacgctccaggaaacgcttgcagcctttaatggaggaggtgttccagggcgcggccttctcaaagtcgccgatgaacatctcgtacaggcgcagggtgtcggcgccgtactcctcgaccacgtcgtcggggttgaccacgttgcccaggctcttggacatcttgacgatgggatgctcggccatctcgccgaacttctccaccagatgggcgcgggcggccttttcgctgccgaactctgccagcagctgtttgcgctcggcgtcgggcaggttctcaaaggcatgggggttgaggcccaggatcatgccgtggctggtacgcttgttgtacggctctttggtggggaccacgccgatgtcgtacaggaacttgtgccagaaacggctgtacagcaggtgcagggtggtgtgctccatgccgccgttgtaccagtccacggggctccagtattccagggcttccttgctggccagggcctcgtcattgtgaggatcacagtagcgcaggaagtaccagctggaaccggcccactgaggcatggtgtcggtctctcgcttggcgggaccgccgcagcaggggcaggtggtgttgacccactcggtgtggcgggccagggggctctcaccgtcggggccgggctcaaagtccttgatctcgggcaggcgcaggggcagctcgctctcgggcaggggctgccagccgcacttctcgcagtagaccatggggatgggctcgccccagtaacgctggcggctgaagacccagtcacgcagcttgaagttgaccttcttgccgcccttgtggttttcttccagccaggcgtacatcttttccttggcgtcctccacagacaggccgtccaggaagccggagttgaccagcgtgccggtggccacgtcggtgaaagcagcctcgctcaagttggagggttcgttgcccttgacgacctcgatgatgggcaggccgaacttggtggcgaattcccagtcgcgggtgtcatgggcgggaaccgccatgatagcgccggtgccgtaggtagccaggacgtagtcggagatgaagatgggaacgatcttgccgttgacggggttgaccgcctggacaccgtcgatgcagacgccggtcttttccttgttgagctcggtacgctcaaagtcggacttgcgggctgcctcagcctggtaggccttgatctcatccacgttcttgatgaggccggcatccatccatttctggatgtaggcatgctcggggctgacgaccatgtaggtgcagccgaacagcgtatcggcgcgggtggtgtaaacggtcagggtatcccctgcggtggtgtcgaagttgatctcggcaccgtggctgcggccgatccagttcttctgctgggtggagacgcgctcgatgtaatccagaccgtccagatcgtcgatcaggcggtcggcgtaggcagtgatcttgagcatccactggctcttgaccttgtggacgacggggctgccgcagcgttcgcacacaccgttgacgacttcctcgttggcaaggacgaccttgcagccggtgcagtagttgaccgtggtctcctttttataggccaggccctttttgtacagctgcaggaagatccactgggtccacttgtagtagttgggatcggtggtgttgatctcgcggtcccagtcaaaggacaggcccaggctctggagctggctcttgaaccgggccacgttcttggccgtcacgatctcggggttgatatgatttttcagggcatagttctcggtgggcaggccgaaagcgtcccagcccatgggatacagaacattatagccgcactgacgttttttgcgggccacgatatccagggcggtgtagctgcgggggtgtcccacgtgcaggcctgccgcggaaggatacgggaactcgaccagagcgtaaaacttcggcttggtcttgtcgatctcggcatggaaggtatgttcgtccgcccagaccttctgccatttggcttctactgctttgtaatcatatttcacgattcgatctctccccaatgcgggctttgcccgcagttttgactttactctatcgcctttcggcgcagcagggcaggccctgcgcgctgctgcgcgcggggcctgccctgtcggtcactgtgcttcgccgtctgcgcggtcttccggcaggcgccactcggattccggcatcggctcgccgtccgcccacagatgctccagatcatagaaatcatgggcttcctgggtaaagacatggacgatgacgctgccgtagtccaaaaggatccagcgcttgccgtcgtggccctcggtacgcagaacgttgaccccctgacggccgagctggaaatctgcctcgtcagccagagcgcccacgtgagtggtggacgtgccggtggcaatgacaaaatagtcggtcacagtggtcaggtcgtgtacacggatgacgcggatgtcccgcgctttcttggcatccagcgcacgcgcaagtgcaatggcaagttccttgctttccatgcggttcctcctgtttgctttttccttactacaaccggaaaagcccctgccgtatttgcgggggccctgccggggtttgctttattatgccgcgtcgtcggtctcctcagacgaggaatccgagctgtcggtgctttcgctgccttcctccggcgccggagtttcggcgggaaggtcgtaggtcgcgttgggatcggtcgcaacgccggactcgttggcggaatcaatgacgtcctggttcagcgctcccatatactgcacgttgggatcggtgggcgtgcggttgccgatgtctaccacattgtcgcagatgttcagatcctctgccgcgacctgcgtttccggtgtgcggaaatactggttgagcaggtctgccgtcccctggcggtagatgacgtcaatatcgttgtcattgtaatacagctgacccatatagaccgggacctggcacagcatgatatgatcgctgctgacgctcagcaggctgaccgctgcgctgaccagctgggaaatcggaaggtcggtttccatatagttcatgaccacgggcaggatcttggcaatatcccacaccgtcatggcacgcagacgggcaaacatggcggagtagaaataccgctgcacgttcagacgctgaatgtcgctctgggcgtaggtcttgcgggcgcggaggaagaactcggcggtggggccgtccatccactgcaggccctgatccagatggctggtcacattgccgtaatcatcggtgtaggtgatctcttccggaacatagacctgaatgggaccgagggtatccaccagttccaccagtgcctccagccggatggccacgtaaccgtcgatatacaggcccagctgctcgttgatcagggtggcgagggcatcgtagttgttgttgccgtcgctgccctgggtgatggcaacgttgttgatctgatagttgtgggaaacattgtagtcggtggtgaccagaatgttgcgggggatctgcagcatacggacttcattattgacaaagtccagctgcacatacatgatcatgtcggtgttgccgtcgttggcttcactgtcgttggtggagcctgcggccatatcgccgccctgggcgctgcggtcaacgcccagcaccagaatgttcagctgctggccgtccaggcccttgggagtgttgatcaactcattgatggaaaccgaaccgcccttgggacggatggcgttcatgatgacgccgatggttcccgcaaagatcagagcaatgaccagcacggtgcccagcaggatcttccaccaggtcaccttgcgcttgcgtttgccgcccttgccctttccgctgccgccgtcatcgccgccttttttgccacggccgggacctttgggcggcttgccgcctgcagagccgccgtatgcggcgcccgctcttgcggacgaggcacctgccccgccggcggtgcggcctgcactgccgcgggaagcctgtgctgcggcagccgctgctgccgcactggcggcctgcgcagccggctggccggaagcctgcgcggtgctgcgtgccgccgtctgccccgatgcagagcggtggatggtgcggcccgtctgggatgcagccgatgcgctgcggttgatctgccgctgaggctgcgcactctgggcaggctgggcagaacgtgccggagccgcggtgcgctgctgggctgcctgtgcagcctgggcctgagcctgtgcctgagcacggcggcgctggcgggcttcgaactcggcatcgttgttgatgtcatacatgggcttgctgccctgggcacggctgaggtccaggtgctggacccgtgcgcctgaggtgggtgcctgctggacccgggggaactgctggctgcggcggagacgtgcagcctcggcatcggcacgggcgcgggcacgggcttcctccaggcgggcatcctcatacccgcgctgggatgcggcgcgctgctgctcatagcggcggcgggcggcttcccgggcggcatcgtccgaatgtgcggcggaggcaccggtattcaccgaacggccggacgccgcctgggcatcccccgcgtgatatacattctgcgcattgctcggggtgcggtgtccccctccgatattgattttccgaggctcgctcattggctgctcctcctgtaattttgacgttgggttttcgggcgtcagtctccccatttcatacaggggtatcaggtgcggtgcatgattgtctcccgcacatcctccagcgcggcaatgctttcggggtccaccggcttgccgccgtcattcacaaattgaaggctgtgttccagcgcggtgcacaaagccaggtcgaggtcctcaaactccagtttgcgcagttcctcaacgccgggaaaatcccgttcgtcgctggtcatgtcggccatataaatgatcttgtccagaaggctcattcccgccttgccggtggtatggcaccggatggcggagaggatctccgggtcggtgacgccccactgggtctggcacaaaattgccgcggcaagcccgtgccatacaggcgcaggccgctgggcagcattatttgctattatagcattgtcctggaaaatctgcaacaactcggattttggcagttccttggcactgtcgtgcaaaagcgccgccagggcggctttttccgggtctgcgccccagcgctccgccagagccaccgccattttttttacatttaaggtgtggcgataccgcttttcccccagacgggatttgaccagttccttggcttccttacaggtcacgcaagattctccctttcgtattttgtgtgtttcaatctacaaattgtaataaatgtcctgtattcgtgctttttttgcggcacgaaacgcatcatcgccgttttttgttaatacgttttatattttgaatcagttcttgtacaattcgtattcgtcaatcagttccggcaccgggggcggcagcagtttccgggcggtggtatcccctgctttcagccgggcacgaagcatactggaggcacactcaaaagccggggcatgggcaaacaggacccgcccgccgtccgcccgcaggctgtcggccatacggtgcaacgcgggggcgtcgcctccctggcggctttccaccaccagggctgccagttccaggatccgctgccagctgtgccactcccggaaggtgagcagcatgtcgctgccgatgctgagatacagctccgcccccagataggcacggtggagcatctccagcgtttccacggtatagctgcgcccggcacggtcgatctcccaccggctgacccctaccccggggcccagcgccgtaaagcaggcgcacatagccaggcgctgctccgccggggtggagctggccgccttgtggggaggaatccccgcgggcataacgataacgcggtcaggggcgatcagctccatggccgcgcgcaggttattcatgtgaccgaggtggggcgggtcaaatgtaccgccgtacagcagcagtttcattttgctaggatcgcgtcaaaggccgaatccttcttctttttgaggaagagaacgaacttgcggccgatgacctgcacacagtcggcgccggtggcctcggtcaggatgtccgcagcctcccgggcggaatactcgctgttttccagcaccttgagcttgatcagttcccgggctgccaggcagtccgccacggcggcaatcagggtgtcgtcgatttcgcccttgccgatctgaaagaccggttccagagtgttggccgctgcgcgcagagaagcacgctgtttgcttgaaagcatagtggtctcctttatctcacgccatagggcgttgttctagtaaatcatataaaagtttctaaattattacaaagttgcaaaaaatgccgggagcgtcagtttcagccttccccgcccagaatgtcgggcagggccttttccatgaccgccatggcacggccgcggtggctgatggcgtccttttcgccgtccgccagttccgcataggtgcggccctgggtgttgggaacggtggagccgtcgggcaggcccacacagtccggcacgaacagcgggtcgtagccaaagccgttggtccccttttcctcaaaggcaatgcggccggggcattcccccataaaggtatggcattccccgccgggcagcagcacgcacaccgcagacacaaactttgcggcgcgggagccttcgggcacggcggccaggttttccatcagcttgcggttgttggcggggtcgtccccgtgaacgccgcagtagcgggcgctgtaaacgccgggttcgccgttcagggcgtccacgcagaggccggagtcatccgccaccgtgggcaggccgctggcctggcagaaggcttccgccttgatgcgggcattctcggcaaaggtggtgccgttttcctcggggtccaggtccaggcccaggtcgcgggggcttttgacggtatggcccatccgttccaggatgcggcgcagctctttgagcttgccggcgttgttgcttgcggcacagatgatcattgttcggtcgcctccgtctcctcatgtttgggcagttcgggcagcagggcttccgagaagtcggtagccgagaagaagagcagatcgtcgatcttctcgcccacgcccacaaagcggatgggcaggcccagcttctggcggacgccgatgacgcagccgcccttgggggtgccgtccagcttggtcagcaccacgccggtggcgccggcagcgcggcagaactcctgggcctggctgatggcgttctggccggtgatggcatccagaaccagcagcacttccaagctggcctcggggctggctttcttgacgctgcgggtgatcttggacagctcgtccattaggccctttttgttgtgcaggcgtccggcggtatcggcaatgaccatatcatagcccttggctgccgcgctcctgaccgcgtcaaaaatgaccgctgccgggtcggcgccctcccctgccttgacgaggggcacttcggcacgctcggcccacagctccagctgctcactggccgcggcgcggaaggtatctcccgctgccagcatgacctttttgcccaggtccttgtagagatacgccagcttggcgatggtggtggtcttgcccactccgttgacgccgatgaccaggatgaccgccggcttgccggtgaggtccaggtcgtcggtggggctcatttccaggcggatcagttcccgcagggccttgagagcttcctcgccggttttgaggtgttcctcccggaccttgtcccgcagttcgtccaccaggcggatggcgcagtcggggccgacgtcggccaggatcagctgctcctccaggtcgttgtagagatcatcgtcgatctgggaattggtcagggtgttgacgatgccggcaaaaaagccggtgcgggtcttttccagaccatcgttgatttttttcttgcggaatgcgtcaaacaggcccatggggcacctccttggaaaaatacggtctatggatacgcggcggtcaggagatcaggtccgcggatacgttgttcaggtccaggcgcaggatcttggagacgccgtcctcctgcatggtgacgccgtacaggacgtcggcggcctccatggtgccgcggcggtgggtgatgacgatgaactgggtgttctcggtcatgcggcggagatactgggcgtagcgcaccacgttgacgtcgtccagggcggcctcgatctcgtccaggatgcagaagggcgaggggttgaccgccagaatggcaaagtagatggagatggccaccagcgcctgctcaccgccggaaagggcggacaggttcttgatgaccttgcccgggggcgagacctcgatctcgatgccgctttccagcacgtcggactcgtcggccaggtagagacgggcgctgccgccgccgaacagttcccggaagatctgcccgaaatgggtgttgatcttcttgaagctgacggtgaacatctcccgcatctggtcgcacagctcgttgatcatgcggtgcagctcggcgcgggatttctccacgtcggtgacctgggctttcatgaagtcatagcgttccttgacttccttgtattcctcgatagcccccacgttgacgttgcccaaagcgcggatcttgccccggacttcggtcacctggcggcgcagttcggtcacattctcaaactccacgcacagggcctgagcctcgctctcggccagctggtattcctcccacagcttggacgcggtggtgttcagctcggtctcggcggcggaacggcgctcggccaggcgggccatctcgccgctcatccgctcgcgctcatcggtcagggcgcggttctcctgggtcatgcgggtgatctccgcctctttctccatgcgggcggtaccggcatcccggatgatctgctcacactgggcaatgcggctgcggttttcctcccgagtgcggcggatctcttcaatggaaagctcgttggcgcggatgcgctgctcacaggcttccatggtggcgttcagttcccgggcgcgggcttcggcctcgccggtacgtccggccaatgtttccagggccgccgcatgaaggctcaggtccttctcggcggtcaggcgggccacgcggttttcgccggcttccgcggtcaggcgctcccgctcggtggtgagagtgtcgtcgctctcgcccaggccggccagttccttttcacaggcggccagctcggtctcggcggcggctcggtccttgcccgcctgctcggcggcggcgcggctctcagccagctgggcttcgaacagggtgatctcctgttccagcttctgcatggtctcctcgccctcgttcagggccgcggtcaggcggtccagctccagagatgcccgcaggcggtcggcagcggcggtcataccctcgctgtcggcgccggtgagctgggcctgcagggcttcggcttccgccttgcgttcctgggcagtctttgcggcggcatcccgcttctgctccagggcggtcagacgggtgtggagttcttccagttcctgcttgcggctgaacacacccacgctgcgggcagtggaaccgccggtaaagctgccgcctgcgttgatgacctggccgtccagcgtgacgacccggttgcggtagccgaggttgcgggccacggcagaggcctcggtcaggtcctccaccacgatgatgcggcccaacaggttgttgacgatattctgatagcgggggtcggcgctgacaagatcggcggcgacctcggcggtgccggtcaggcggccgttgaagcggctgccctgcaccgtgtccaggggcaggaaggtggcacggccgcccttctccgccttgaggaaagcaatggcagcccgggcggcggattcgtcctccaccacgatattttgcagggcaaagcccagcgccgtctcgatggcgacttcatagcccttgcggacggtgaggatgcccgccaccgggccaatgaccccgcgcaggcggcgggaggcggcggccttcatgaccgttttgacgctctgctggtagccgtccatgttgcgttccaaatcctgcaggatgtggacccgctgggtggcggcgctcagttcccgctcggccttttgcagggcgtcggcggcttcggcctgctgctttttgcggctgtccagtttcaggcgcagacccgccttgatgttgtccaggcgagtgaccgcttcctccgcctctttcagacgggcggcggcctgctccctggcttcccccgcggtgcgggcggtctcggcagcagtctccttgcgggtgcgggcgtcggtcaggcgggcttcggcggcgttggccgcactttgggccgtggcagcctgcacctgggcggcggtggcggcctgctggtgccgcaccatggcggcgttgatcaggtcgcggcgctcgccgctctggcgggcctgctgttccagttcggagagctgcttttgcagttcctccgctttatggtcgatgtcgttgatcttggcgttgagctgctccatggcggcgcggtggccgtctgcctccagctcgatgccgcggcggccctcgccggagcgttccagttcggctttggcgtcctcgatctggcggcggctgtgctcgttctcgttttccagaacggcgatgcggctctcgctgccggcgtttttctcggtgacttcgcggatctcggcgttggcctcgtccgccttgaccatcagctgctgggactcggcgcgcagctgttcggcgcgctcgtcatactgttccaggttgcggctgatgcggtcgtaatccgcctgggcggcctcatatttccgctgctggtcccgcaccgtgtccttggcacggcggatggcgtccacccacagggtgacttccaggcttttgcgggtctcggacagagtgaggaactgctgggccttttcgctgtcccgcttgagaggtcccacccggcgttccagttcgcccaggatatcccgcaggcgttccagattgccttcggcggcggccaggcggcgctcggcctcgtttttgcggtagcggtagcgggcaatgcccgaggcttcctcaaaaatttcccggcgttccccggatttggcggccacgatctcggcaatgcggccctggcctacgatggcgtagccgtcgcggcccaggccggtatccagaagcagctcatacacgtccttgaggcggacgctctggccgttgatgctgtattcactttcgccgctgcggtagtaccggcggccgatgaccacctcgtcggcatccatatccagacggtggtcggagttgtcgatggtcaggctgaccgaagcatagcccatggcgccgcgggtctgggttccgccgaagatgacgtcctccattttgcccgcgccgcgcagctgcttggagctggtctcgcccatgacccagcggatggcgtcggagatattgctcttgcccgagccgttgggtccgacaacgccggtaatgccctcaccgatggtcaggcgggtcttgtccggaaagcttttgaagccctggatctcaagttctttcagacgcatagatagggatgtactcctttgtatgtggcgggcgggtgcggtcaggtcttatccaccaggcccatcaggcgcagcgcttcccgcgcggcgtgctgctcggcagattttttgctgcggccctcgccccgggcaatgcagttggagttgaggtagaccgccaccccgaaccgcttgtcgtggtcggggccggattcagtctccacttcatagtggagcttttcctcggggttctgctggatgacttcctggagtttggtcttgtagtcctcctcggcagttttgccctctgtcagaaagggctggataaagctgcgggccacttccagcccgccgtccagatacagtgccgcgatgactgcctcgaaggcgtcggacaccacgctgggacgctcccggccgccgcccagttcctcgccgcggcccagccgcagataggtccccagttcgatctcctgggcaaactggaacagtgcgtcctcactgacaagggaggcacgcatacgggtcagctcgccctccgggcgggtggagtggtggaacagatagtccgccgccaccaccgacagcacactgtcgcccaggaattccaggcgttcgttgtgctggaccggcgtgcgggattcgttggcgtagctggtatgggtcagcgccgtggtcagcagcgttttgtctttgaaatgatagcccagcttttcctcaagctgtgcgggggaacgagttttcatgcttccacaccctttttcatggcagtgtcgttggcagccagttcggcaagggctgcggacatggtgccgcagaggtcttgctcaacgcagatgcgggcctggcggatggcattcttgatgcccttggccttgctggaaccgtgggccttgatgaccggcttggcagtgcccagcaggggcgcgccgcccacttcctcggaatccatcttgtgcttgatgcccctcaggccgcccttgacccccaggtagcacagcttggtgacgatgctgtgcatgaacacatccttgagcatgcccagcaggctcttggcaacgccctcggtgagcttgaggacgacattgcccacaaagccgtcgcagaccacaacgtccacgtcgccggcgggaatgtcccggggctcaatgttgcccacaaaacggatgacggggttttcccgcatgaggccgtgggcttcccggtagatgggggtgcccttggtatcctcagcgccgttgttcaccagggccacggcaggatcggggcggcccatgacctttttggcatagacgctgcccatgaccgcaaaggcgttcagggtggcggcgcggcattccacgttggcgccgcagtccagcagcaggtagttccggttcaggccgggcatgggcgtggccagggccgggcgtttgacgcccttgacggtgcggacgatcaggctggcgcccacgtgcagtgcgcccgtggagcccgccgagacaaaggcgtcgccctccccgtttttgagcatggtcaggccgcgcaccaggctggaatcggtcttatgacgggccgccttgacggggtcgtcgtgcatggtgacgacctcccggcaatcgatgacttccatgccgtccagagagatattgttctccttcgcggtcttttcaatgacgtcggcctggcccaggagcaccagctccatgccgtcgccgaactcacgcacggcgtccgccgccccctgaagtacacacagcggcgcgttgtcgccgcccatggcatccaccagaattttcatacgttcccctcgctttcaaatcattggcccccggcaggttcttcgctttcgcggacccacccggccatggccgcctgcgcggtctcggacagagcggcatagcgctcccgcttgtcccggatgtcggggcgcgagggcaggatgcccatgttggcgcccatcggctggaaatctttattgggtgtggtaatgtagcggatcagtgcgccgcacatcgtcgtctcgggcggaggcgaccagggacggccgcacagccgggcatacaggctgcgcgcggccagaagtcccgaagccgcgctctccatataaccttcaaagccggtgatctgcccggcgaaaaagacgtcgggatgctgtttgaggtacagtccgtcggaaagcaccgccgggctgtccaggaaggtattgcggtgcatgacgccgtagcgcacgaactcggcgttttccagaccggggatcatggaaaagacccgcttctgttccccccacttgaggttggtctggaagcccaccagattgtacagggtgcggtcggtgttttccgcccgcagctggacattggcccagggacggtgaccggtgcgggggtcccgcaggcccaccgggcgcagaggaccgtagcggatggtatccgccccgcggcccgccatgatctcgatgggcatgcagccctcgtagacggtcatgggagtgtcgaagtcgtggagcggggcgcgctcggcgttgacgagggcattataaaaggcctcgtactcctccttgttgaaggggcagttgaggtagtcggcctcgccccggccatagcgggacgcggcaaagatgcgctccatgtccaggctttccgccgtgacgatgggggccacggcatcgtaaaagctcagccggtggctgccggtcagggccgcgatggcctcccccagtttgccgtcggtcaaagggccggtggccacgaggaccggccggtccccgggcagggaggttacttcctcccggtgcaccgtgatgcgggggtggttttccaccatttgggtgacggcctccgagaacttgtcccggtccaccgccagggcgccgcccgccgccacccgggcggtctcggcagcgtccagcagatgggagcccatggcccgcatctccagtttcagcaggccggaagccgagtcgggacgctccgccttgagggagttggagcagatcagttcggcaaagccggcgcttttatgggcaggggaaaagcgggagggcttctgctcgtacagatccacggccacgccgcggtccgccagccagagagccgcctcgctgccggccaggccggcgcccagaacattgatttgcatagaggttcctttccgatgccaggacgttattttttctccacgggcttttcaaagccgcagccttccttggcacagtagagcatgccctttttcttgaacagcgtggcgccgcacttggggcaggtctcgggtaccggttcgtcccaggtcatgaacttacagttggggtaattgccgcagccgtaatagacgcggccccgggcgcttttgcgcaccagcatatgaccgccgcacagcgggcagaggccgccggtatccttgaccagcgggcgggtgttcttgcagtcggggaagccgctgcaggccaggaacttgccgtaccggcccgacttgatgaccatgggcttgccgcacttgtcacagatctcgtcggtggggatgtccgccaccttgacccgcttgccttccatgtttttttcggcgttttccaggctcttggcaaagcccttgtagaattcgtccacggtatccacccagttggcctgaccgctttccaccgtgtccaactttttctccatgtcggcggagaacttgatgtccacaatgtcggggaactggtccagcatgacactgttgaccgcctggcccaaaggcgtggtgcgcagctttttagcgtcccgctccacatagccgcggtctacgatggtggtaataatgggggcgtaggtggagggacggccgatgccgttttcttccagagcgtggatcagggtcgcctcggtgtagaggggcggcggctgcgtgaacttctggtcggcatgcaggcgctccaaaggcagggtctggccctgttccagcgggggcagagcggtctcctttttctccttgtcgtcggtggcttcctcgtaaagggcggtgtagccgtcaaaggccacctgatagccgctggcacggaacagatagtcccccgccgtgatgcccaccgagacggtatcctgctcacagtccgccatctggcttgccataaagcggctccagatcaggcggtagagcttggcggtatcaccggtcaggctgccgtccacctcgtcaggggtcaggcccggcaccgaggggcggatagcttcgtgggcgtcctgggcggcagtggcggaacgggacttgtatttgcgcttggtcttgcagatatagcgctcgccccagcggccgccgatatactccttggccgcggccaccgcctcgtccgagacacgcagcgagtcggtacgcatataggtgatcagaccgatggccccgtggcctgcgatctccacgccttcgtacagcgtctgggcagcccgcatggtgcgggtggccgagaaaccgtagcggcggctggcctcctgctggagggtggaggtgatgaagggcggcggcggcacacggcggcgtcgtcctttatccacctgggtgacggtgtaggtcttgccctccagggcagccagaatgccgtcggcctggtccttgttggtgaccgacagctttttgccctcggcatcggcagccagacgggcagtgaaagcagtgcggcccttgccgaattcggcgtcgatgttccagtactcgtcggggacgaacttttcgatctcgatctcccggtcgcggatcaggcgcacggccacgctctggacgcgtccggcggaaaggccccggcggaccttgcgccacaaaaagggcgacagcttgtagcccaccaggcggtccagctcacgccgggcctgctgggcattgaaaaggtccatatcgatggcgcggggatgggccatgccctcctgcacgccttttttggtgatctcatcaaaggtgatgcggttgggctgggacgggtccaggcccagaacgttggccagatgccagctgatggcctcgccttcgcggtccgggtcggtggccagcagaacgccgtcggaatgcttggcctcgtccttcagttcgcggaccagcttttccttgcctttgatggtgatatagcgcggcgtgtagccgttttccacgtcaatgcccagctgggaggcgggcaggtcgcggatatggcccatgctggccgtgaccttgtagtctttgccaaggtatttgccgatggtctttgccttggccggggattccacgatcactaactttgccatgtgtgatgacactcctgtctgctgccgccgaaacagcggcggcgctggtctgccggagcggaaagtttccggcttaaaacaaatgatgcccgttttggaggccacccctcaccgggcggccgccaggctgcggccgggacccggcacggcggcgccggccagttccagctcggtataggcggccagcacctgcgcggcgggaagctgcgcggcgcggcagatgtcctccaggtacatcgggtcggggcccagcacctccagcaccttgcgcgccgtcagcgacaggtcgggaagatcgctgtcccccgggtcattttgccacagatcggccccggacgcaagccccaaaagctgctccacgtccccggcactgcgcaaaatatgcgctctgccgtcctccagcagggcgttggtgccttcgctggcacggctgaaaatgctgcccggcaccgccatgacggggcgtccatagtgctcggcgtggcccaccgtattgatggtcccgctgcgcaggctggcctcgcagacgcacaggacttcccccatgccggcgatcaggcggttgcgggccaggaaggtcccctgcattttgccggaaaatcccggcgggtattcgctgaccaccgcgccgcccagccgctcgatctcctcccgcaggggagcattggccgccgggtaggtcttgtcgatgccggtgcccagaaaggcgatggtctcgcccccgcagtccacggcggccttgtgggcttccccgtccaggccgtccgccagtccgctgatgagcaccacaccctgctccgccagcgcccgggagatctccccgcaggcacggcggccgtaaggcgtgggacggcgggtccccaccatggagacataccgcctgccgttcaggcaatcggtacgccccgttacatataatacaaggggcaggtcgggcagcccccgcagacgccgggggtagtcggggtcttccggggtgaggatggccgcgccgatggcttcacagtcggctagccgccccgaaaggtcggcgggttccagttcacgggcacgggtcatggcggcccggctcatgaaatccggccgcagccccgcgcgcatctggttgtaaaagtcccgggctccgccgtaccgtgccagagcgatccccgtagagggagaaccctggcccaggacatcggacatccacagccaatagagtatatcttccatccctgtcccccgttttcgctcacaagccccggaaatgccacagaagcacgctgccggcaacggcggcgttgaggctttcggcccggtcggtcatggggatctttaccgccttgccgcaggcgtcgatggcggcgtcggtcaggccctggccttcgctgccgatgacgacgcagagaccgccgtcaaattcccggcccacggtatccagcggcaccgcgccccgcagggcggctgccaggcaggtcacgccccgctggcgcagttcggccagacgggcgggcaggtcctgggtgaccaccaccgggatgcgcgcagcagcccccatggaggcccgcagcgtgcggggcgcaaagggtgcggcacagcccttgtccaaaagcaccgcgtcaaacccgaaggctgccgcgctgcggatgagggtccccacgttgccggggtcctgcacccgttccagggcaaggatgcgccgggcgccggtcaggacttcggggccgggggggggcagttcaaacaggcaaaagacctgctggctgtttttggtggaggacagcttgtccgccacgtgttcctccaccggccaggtcaccccgtcgaactttgccagttcgggggtgcggtccaaagcgcgccgggtggcaaagcaggcagtgcagcggcaggccgccgacagttccaggcagagcttgggaccctcggcaaaaaagaggccttcggcgctgcggcgggcttcgtcgtcccgcaggcggcaggcgtgtttgactttttcattgtcgcggctggtgatggtatcgttcactggcttcccccgtatcctgccggtgggtccggctgattttcccctgaaacacaaaagcgacgcacgcgtgcgcgtgcgtctgctttgtcgtcttacttgttacgcctgagccttcttggcggtctcgacgagagccgcgaagctctgaggatcatggatggccatctcagacagcatcttgcggttcagctcgatgccggacttcttgagggcgttcatgaaggtggagtagttcatgccctggggacggaccgcgttgttgatgcgggtgatccacaggctgcggaactggcgcttcttcagcttgcggccgacgaatgcgtagttgccgctcttcatgacggcctgtttggccatgcggaaatgcttgctcttggagccgtagtagcccttggccagcttgagggtcttggtacgacgcttatgcgtcatggtagcgcctttgatacgtgccattgtattctatctcctttatactctcgatgtcagttcctaaccccggatggcttagccgccgtagggcatcatcttgcggacggtagcctcgttggacttgtccacgtagtgattcatgcgcagaccacgggtgagcttggtggtcttcttggtcaggatatgacggcgcttggacgcgttgcgcttgaccttgccgctggcagtcatcttaaagcgctttttggcgccggaaagggtcttgagcttcattttagccattttcagtttcctcctagagcgttgtttacttgttcgggctgggcgaaaggaacatcatcatgctgcgcccttcgagcttgggctgcttgtcgatgacagccttgccttcaagcgcctcggcaaagcgcttttcaacgtcgatgcccaggttggtgtgcgccatctcacggccgcggaaccggatggagactttcaccttgtggccctgctgcaaaaacttgagcgcctggttcactttggtgttgaagtcgttggtatcgatgttcagagaaaggcggatctccttcagctcgacgaccttctggttcttgcgggcttccttttcctttttctgcatctcgaagcggtatttgccgtagtccaggatcttgcataccgggggttttgcctggggggcgaccttgaccagatcgaggtcacgctcctgcgcaagacgcagcgcgtcgcgcgggctcatgacgcccatctgctgaccgtcggcgccgatcagacggacctccttgtcgcggatccgctcgttgatttccagttccttggaattgctgttgctggcgatgggaacacacctccgtcacaaatatcattgggaaattgtacacaaaaagcggctgccagtaccaagcagccgccaaactcacacatacgcacattgccccaaagcggggaaatgccaaccgtaatgacccggggtatggatacccgcaaggtgagccgacggcgtccaacgccggtcgctgctttttttacagcgactagtttaccatgccccgcagccgatgtcaaggggcatttgtcatgcaaagggcaatttttttgcggaaaatctatggcaacacgcgcataagtatggtatgataagctgaacatgcctgcgcgcgggtaaaaagcgcggcatgcgttaggaagggagatatgcgttttatgtcgagttcgactaacgataagcttcgggtcgcgctgtttttcggcggcgtttccagcgagcatgaggtcagctgcgtatcggcggccgcctgggtccgcgccctgtctgctcagccctgctgcgacaagtacgaggtggtgctcatcggcatcaccaaaagcggccgctggctgcgctttgacggcagcgccgacgccatggccgacggcagctgggagcaggatgcctcctgccgtccctgcgtgctcagccccgaccgcggcgaccacggcctgctggagtttggctccgacggctccgtgacccgcattcatattgatgtggcggcccccgtgctccacggcaaaaacggcgaggacggcaccatccagggtctgtttgacgtggcgggcatcccctatgtgggctgcggcgtgctggccagtgcggtctgcatggacaaagcggtggccaacaccctgatggacgccgccggtgtcccccactgccattggtgctgggccgccgccgaggaggccgacgacctggaagccctgtgcaataaagtggagagcgtgctgagctaccctgttttcgtcaagcccgccaacgccggttccagcgtgggtgtcagcaaggctgccgaccgggaggccctcaagaccgccatccatgtggcgctggccgaggacaccaaggtggtgtttgaggaattcatcgacggccaggaggtggagtgtgccgccttcggcaacccggagaccggcgtcaccgtcacccatcccggcgagatcctggccggggccgagttctacacctacgacgacaagtacaaaaacggcgtgtcccaggtggtcatccccgctcatctcagcgaagaaaagctggatgaagtgtccgcactggccaaaaaggcctttctggccctgggctgcaccgggctgtcccgctgcgatttctttgtggagaaaggcaccggccgcgtgctgtgcaacgagctgaacacgctgcccggctttaccgccatcagcatgtatcccaagctgatggaacacgacggcgtaggcttctccgacctggtggaccgtctgatcggtctggcacttgccaaaagaaagggtgcttattgagctatggataaccgtcccatcggcgtatttgacagcggcctcggcggcctgaccgccgtgcgtcagcttcggcgggtgctgcccggcgaggatatcgtctacttcggcgacaccggccgcgtgccttacggctcccgcgggcgggacatcatcgtccagtacgcccgccaggacatcggctttctgctgtccaaggatgtgaaattcatcgtcgccgcctgcggaacggtcagctcgacctacccgcccgccgaggcttcccgcctcccggtccccttcaccggcgtcgtgggcgccaccgctcgccgggccgccgccgtcacaaaaaacggccgcatcggtgtcatcggcacccaggccaccatccgcagcggcagctaccagagcctgctgaaagagctggtccccggtgcacagctgtttgcccgggcctgccccctcttcgtgccgctggtggaaaacggctacatcgacgagggcaatcccgtgacccggctggtcattgccgactatctgaccgagcttcgggataccggcatcgacaccctgatcctgggctgcacccattacccgctgctggagggcctgatcggcgagttcatggggcccgatgtgaccctgatcgatccgggcaagtccaccgccgacgcgctggtggatgccctggacgccctggaactgctcaacggcaggaccgaaggcgggcaggcggaattttacgtcagcgacaccaccgaaagctttgccgaggccgaggcactgttcctgggcaagtacggcggcggcccggtgacccagatcgcgatcgagcagtatgcttggccgcccaaaccctaacacaggcaggtaaacgcaaatggatgaaaattatctgatcaccatcaaaggcaccatggagcaggacggccacagcgacagcgtggaactgatgacccacggcagctttttgcagagagacggaagtttctatatcatatataaggagaccgaggccaccggctacgacggctgcaccaccaccgtcaagatttcggaggacgcccgccgcgttgccatgctgcgctacggcaaggcccagagccagctggtcatcgaaaaaggcacccgccatctctgccactacgagaccggatacggggctgtttccctgggtgtcgccgccgacgagatcgagcacgagctgagcagcaacggcggtcatgtcaagttcagctacacgctggactccggcagcgaagattttatcagccgcaacctggtggacatcaacgtgacgccgctgccccagccggacagcgcatcgtgacgttcaaaccatacaagatttgtaaatactgcaaaggagtgcgtttttcatgaccgattaccgcaactacaacccccgcaagaccgccctggacgcagcccgcgacctgctgaccaaggccgcctgtgccgccatggacagcggcgctctgcccaagaccgatctgccggatttcatcgttgagatcccggccgacaccaaaaacggcgacgtggccgccaaccttgccatggtgggcgcccgcgccttccacaaggcgccgcgccagatcgccgaggctgtggttgcccagctggatctgaccggcagcctgtttgcccgtgtggagatcgccggtcccggcttcatcaacctgttcctgggtgacggctggttcacctccgtcctgcgcgccgcctgcgcgggccaggattacggccgcaccgatgccggtcagggcaagcgctacaacgtggagtttgtttccgccaaccccaccggccccatgcacatgggcaacgctcgcggcggcgctctgggcgactgcctggccgcctgcctggactgggccggttacgacgtgacccgcgagttctacatcaacgacgcgggcaaccagatccagaagttcggcaagagcctggccatccgctatctgcagctgtacaagggcgaggaggcctgccccctgcccgaggagtgctaccagggtgccgacatcatcgagcgtgccaaggagtttgccgccgtccacggcgacagctacgtcaacgccgattttgaggaactgaaatccgccatcaccgccgatgccctgcccaagaacatcgccggcctcaagcgcgacctgggcaagtaccgcatcgagtacgacgtctggttccccgagagcaccctccacgacagcggcgcggtgaacgacatcgtgcagatcctgctggacaagggcgcctgctacaaggccgaggacggcgccatcatgtacaagagcgcccagtacagctccaagtacggcgttgccaacaagaaaaagaccgatgacggcagcgaggaggaagccaaggacgaagtcctggtccgcgccaacggcatccccacctactttgcagcggatattgcctaccattataacaagctggccgtccgcggctttgaccgtgccatcgacgtctggggcgccgaccatcacggccacgttgcccgtatgaagggtgccatggacgccatcggtctggatggcagccgtctggacgtggtgctgatgcagatggtcaacctgatccgcgacggcaagcccgtccgcatgagcaagcgtaccggcaaggccatcaccctgaccgatctgctggacgatgtgcctatcgattccgcccgcttcttcttcaaccagcgggaaagctcctctactctggacttcgacctggacctggccgtcaagaacgacagcgacaacccggtctactacgtccagtacgcccatgcgcgcatctgctccatcctgaagaagctggagcaggaaggcatcaccttccgcggcagcgatgccgccgacgctgcggtgctggcagatccttccgaacaggctctgctgcgtctgatcgccgccttccccgccgagattgccgcggctgcggaaaagtacgatcccgcccgcatcacccgctacaccattgatgtggccagcgccttccaccgcttctacggcgcctgccgcatcctgggtgcggaggatgccgtccagcaggcccgcattgccctgtgcctgggtgtccgcgacgtgctgcgcaacgcgctgaccatgttcaagatcaacgttcccgagagcatgtaagccaaaagcatcgtcttatcgtacaataaaagaagccccgcaggttgcagcctgcggggctttctgtgtttaggtacaccgaacaaatttattatatcacatccgtcaatgtactttcaactcaatttatgcacaaataaatccttgcaaggttgtcgggtttgcgaatggacgttcatttgggcctatggtatattatagtcacagaaagaaaacagccggagataaggagacagaaactccaagagcccacttctcaaaaggttcggtcacaaagttctgaagttcttttctaaaggcttaaggtcaagttcattgaaggtttctttctaaaaagcacaccgaggaaaacggagcggcaaagtaaatcagaaaaaacggattcagaaatcagaaagttcaaaagcaggtttccggttcaggttttcgaaagaaaatcaaatcaggaaaaggcagatgaaacagaaagagatttgaagaagtgaaatctgaaaggaaatgcagaatccaaaaagaatcggatatgtagaaagagatgcgatggaataccttaaaaggtccagaaaagcaaaattcaaaacagaccgagggtttttgacaagttgtaaaaaagaggcacgccggcaggattcgtaaggaaggaggctcaggtcccatggcaaactttaaagatcccattcatcaccggcaggcctgggcttgctgagacgacagaaaccacatcaagagccgcaggtcataacctgtacagaagcactacaaatgatggttggttctgaaaacgatcaagatgcaatcccagggcctgtcaaatcagacagctttatatagatagatgataagacgaacgaagggtgaaaatccagatagtccgccaaacctgataaagcaaatcttaacctttaagatagagcgtaaggtttcatctagctgaacaaggagttactccaatgtactagagtaaagaggatcttcctctcagcatcacatccccaaagcccattgcaggaaacagatgatcttcccggttccacagatgcagggtaagtaacgaacgatcggaaatacgttgacaaagtgtcctgaagtttcaggccggagccactcccaggtaatccgagatagtttcaaagacaccgtagggtacagagttcctggtaaagcaaactggtcaaatacaaacgattttccctcttcccttccccaggcaaataacgaacgacagggcgatcggtaaaatcttccgaagtatcgaggcagagatccttgaatcttagcctgattccagcaaagttcctggtaaccattacaagcaaatcctaaggtttttaccacacggttccggcaagaatgggttcgatccacacaatatctggaagaggtaactcatgaaaatgagtcaacggtccgaaaaatagtgaatcacgggtatgaggctatgactccgaagaagtaataccggcgggacacacagaaatgtgtgtctcgccttttttggtattgggttattgatgagcacagcggcaaaccggaaggtatcaatcaaataatccttcagctatcaacagttcaagaacttttgcctctctctcaaacatggcctgattgtaagggctttgtgctacattgcgattcttttttatcgcagttttgggatcgacaaattctaaagtatatgtttctgccaattcatactcgtccaagttttgcgcaaccacaccttcctctgcttcacaaaggtaataataattgtcctgaacaaagcattccgtctcatccgcatcgctcttctgaatgcggtggacatatccatattcttttatcgtttcgcgtttaactaccagccccgattcttcacgggtttcccgtatcatagcatctatgggattctcaccgctttcaatccctccgccggggaacttatagtagtcatatttcaagctgtgaaccatagcgatcttgttgtttacaatgataatgcttctggcagaatcgcgaacaaatgtgcgtgtacatttcccgtaatctttcttatccatctcaaatagtaatctcatgttgcctcctcaaatcccgatttttcattaacacacttgctggtggtgaacaacattttatgctgtttgcggacgggaattaatcataacttttttataagaaatatatcactaaaatacgagtaattccaccgcccaatcttgaaaccgcccaaacagcatctacctgctcaggcggtctctgtcaaatacaatcatttcagccctgatgatttcctctgctcggctgcgaattcttggatcgcccccaattcaaaatgcactctccccggtccaaacgctgaatacggtgcatatggtcagacgctcccgcctggccgatgccgtaagtgtaattttgtatgcattactcccttacagggccccatctaaccggcggggcgtttttcttgcatattttgccggagggccgtataataagagtattagtcaaaaatgggaggtgtgcgcatggcgataccgcagccgggccaacatccggtgctcggcattttgggcgggcttggtcccgccgcaagctgttatctctatcagatgctgatcgaccacacccctgccgtacgcgaccaggaccacatcgatattgtgatttcttcccgcgcatcgacaccggaccgaacggcgttcatcgtcggggaaagcaaggacgatccctttcttgtcatggagcaggacggcaaaagtctggttgcctacggcgcaacggtgctggccatcccctgcaacaccgcacattatttctatgaccgccttgcggcggcactgccggtcccggtgctcaacatgccccggctgaccgtggcggccgccaaagccgccgggtgcaaaaagctgggcatcctggcaacggacggcacgttgctggccggcacctatcagctgatgtgcggcgaggccggcgtcgagtacgccgccccctcccccgagcaccagcgcggcgtgatgacggtgatctacgaccagatcaagcagggccagcatgccgacatggcactgttcaatgccgcggctgacgatttgaaacgtcagggctgcgacatggctgtgctgggctgcaccgagctgagcctggtcaaacgggatgaaaagctgggcagctttttcatcgacagcaccgaggtcctgtgcaaaaatgccctgcttgcctgcggggtacagcctatcgggtttgactgaccgctcttttgttttgctgattttcgcgcctttgcgcgtggtttcccggctgccgggcaaatgttttttaggaaggatttggaatcatggacaacaaaaagttttacatcaccacccccatttactaccccagcgacaagctgcacatcggtcacagctacaccaccgttgcctgtgacgcccttgcccgctacaagcgcgcccaggggtatgacgtgatgtttttgaccggcaccgacgagcacggccagaagatccaggacaaggccgccgccaagggcgtgacgcccaagcagtacgtggatgagatcgtcgccaccgtcaaggatctgtggaagaccatggacgtcagctacgaccgtttcatccgcaccaccgacgactaccatgtcaagagcgtgcagaagatcttcaccgccctgtatgagaagggcgacatctacaagagcacctacaagggcatgtactgcaagccctgcgagagcttctggaccgaagcccagctgaaggacggctgctgccccgactgcggcggccctgtctatgaggccgaggaagaagcctacttcttcaagaccagcaaatacgccgaccgtctgctccagtggtacgaggatcatcccgacttcatccagcctgccacccgcaagaacgagatgattgccttcatcaagcagggcctgcaggacacctgcgtttcccgtaccagcgtttcctggggcattcaggtccccttcgatcccaagcacaccatctatgtctggatcgacgccctttccaactatatcaccgctctgggctacggcaacgacacctaccacgactacgacaagtactggcctgccgacgtccacatggtgggcaaggagatcctgcgcttccacaccatcatctggcccgccatgctgatggcgctggatctgcccctgcccaagaaggtgttcggccacggctggctgcttctgggcggcggcaagatgagcaagagcaagggcaacgtcatcgacccggtcaagctctgcgaccgctacggcgtggacgccgtgcgctacttcctgctgcgtgaagtgcccttcggcaacgacggttccttcaccaacgaagcccttatcaaccgcatcaacaccgacctggccaacgatctgggcaacctgctgtcccgcaccgtggccatgtgcgagaaatactttggcggcaccgtgaccgcagagggccgcagcgacgagctggacgcccagctcaccgatctcatcgccgccctgcccggcaaggtggacgccgccatggaggctctggatgtgccccaggctctcattgccatctttgaggtggtgcagcgcgccaacaagtacatcgacgagaccgcgccttgggtgctggccaagaacgaggaggacaagccccgcctgaacacggtgctgtacaacctctgccgcgctctgcacagcgtgaccgtcctgctggagtgctacctgcccaacaccgcacccaaaatggcagcccagctgggcctgaccgatgcagacgtcacctttgctgccctgacctctgccaaggacagctacaccgtccacaagggcgaggctctgttcccccgcatcgacgtcaaggctgagatcgcctatctggaagccgaggacgccaagcgcaaggccgaggcggaagccaaggctgctgccgctgccaaggccgaggccgcccaggaagagcctgccgagatcaccgaccacgaggcggagatcgattttgataccttctgcaaggtagagctgcgcgtggccgaagtccgcgcctgcgagaccatgaaggagagcaaaaaactgctgcacctgaccgtttttgacggcgagcgtgagcgctgcatcctgtccggcatcgccaagtggtacaagcccgaggacctgctgggcaaaaaggtgggcatcgtggccaacctggcgccccgtcccatgatgaagggcaagtatgtcagcgagggcatgatcgttgccgccgacaccgcggacggcggctgtgccatcgccttctatcccgactccgtcaaggccggcagccgcatccactgatgcaggccgctttgggagtgtcctgctttgactgaaccaaaacagaactggcccgccgaccgcctggacgcgctgtttgcgctgcccgcggcggcggtggcgctggctatcctttgcaactgtctgtggggcgcggcgttcccgttcatcaagatgggataccgcctgtttgccatcgacagcaccgacacggcgtccatcctctgctttgcgggggtgcgtttcatgctggcagcggtgctggtctggctgtgcggtcttgtactcaaccgccgtcccttgcccctgcccaaaggccccgtcctgatccagtgctgcggcctagggttatggcagactgccttgcagtatttcttctactactccgccgtcgccgcgctgactggggccatgggcggtatcctgaacagtacccagagttttctgggcgtgatcctggcccattttgtctatggcaaggccgaccgcatgacccgcagcaaagccctgggctgtgtcctgggttttagcggcgtgctggttgccacgctgggagatcacggcggcggcagtccatggggcgttgccgctatgctgaccgcctcggtgatttttgccgttgccgggccatggaacaaattcgtcacccaaaaagcggacagctttgccgtctgctgcatcaatctgggtgtgggcgggctggcgctggctgtcgtgggctttgccatgggcggacgtcttgccccgcaaagccccgccgggctgccggttttgctgttccttgcctttatttccggcgcaggctatgtgctgtgggcactgctaatgaaaaacaacccggtatcccgcattgctgtgttcgggctgctgattcctgttgtcactgtgctactgtccgcccttctcaacggcgagcccctgctggactggcggcatctggccgcactggtgctggtctgcatcggcatctgcctggtcaaccggcgcaccgctgcttcccaatcaacttgaggacccttatgaacgaaatttttgacacccatgcccattactgctcccggcagtttgacgccgaccgggaggaactgatgcctgccttggttcagggcggcgtggtgggcgtattggaatgctccacccactccggggatgccccggctgtgctggagctggcccggaagtatccctttgtccacgcagcgctgggcatccacccggaaagcctgggagacgagcgtgcccctaccgtagcccgttacggcggggactggcgggccgaactggccgccatgcgtgagctgtacgacgccccgcaggtggtagccgtgggcgagatcggcctggaccatcactggccgctgcccgcgcaggagcagtacgatctgttcgaggcccagcttcagctggccgtcgaacttggtctgccggtatcggtccacgaccgggaagcccacgccgagacctacgagttgctgaaaaagtaccgtccccggggcatcctgcactgttacagcggcagtcccgaggacgccgcctggctgaccgcccagggcatgcacctgggctttggcggcgcggtgacctacaagggcgccaagcgggcggcccgtgtgctggcagccgtggaccgcagcgccgtggtgctggagaccgattgtccctacatggcgccggaaccggttcgcggccgccgcaacgacagccggaacatcgcccacgtagcggcgttcatcggaacgctgtgggacatggatgccggtgaggtcctgcgcctggccgcagccaatgcccggaacgttttgggtgtataactactttcattccataatcaggatgtgtcctatcatgttaactgactttttgccccacaagcccaacccgcgccgctggttcgcttcggaacgcactgagctttccgctatgaagcgccccgccgctgccgcaacccttttgctggcccttttgtttgtctttcagttcggatttttgtgctggtgcaacctgacccagtggcagagccatctggacggcgattcctccacccagatcgtaaaagttctggaaatctggaaagccggttccctgtccctttccaactggaatgataccactaccctgctgctggatatgccgctttcccttgccgccgcactgatgcccctgttccgcgatccgtttttggcatatggcgtcagcaatatcatctggctgatcttgtttgtatacggcatctggcagctgcttcgccgggcaggatgcaccatcgctcttcgtctgctggcattgtttttgattctgaccccatacagctacaccgaggtgctgggttatgccaactgcctgctggtacaaagcgcctactatctggtgcgtgccgtgtacatggtctatctgctgtacagtctgatgcagctgtaccggaaagaacgcggtttcggtcatctgatcacctggctgttcacgatgggattgggcgcctggatcggcatgtccagcggcaccttcatgctgttgctggtgcttctgccggtgattgcgggatttgtggtccgcgcctttgccgccgaccgtccgcggctgctgctctcttccggcagcgtgttcctcattttgaatctgctgggttttggtgccggttattttgtccagcgtaatgtcattcatttttcttcccgcgattccatcattgcctggaacagctacaccgagtttcttcccaacctgtccaaggttatccagggttatctcaaactcaccaacgctctgcctgccgacggcggtgtcatgattttgagttccgagggtattgcattcggcatcgcttttgttgtgtccatggtcattctggccggcactctgctctgtctgtggcgaatcagccacgcgcctgccgccgcctgccgtgctgccgagaatgagcgtggattgctgttttccgccttgctgagcatcgtgggcgtggatacgctgattctgattggcgcctccctggcttatggcgaactggtatatgaaagccgttacctgattttcctgttgattgcttcggttctgctgttggccctctgcctgccctggctcaagcgggccggcggattgtatgccccggttctggttttggtcacggccctttgcgtcggcaacgcctttttgtgcgatgcggggtatgtgtcccatccgagctatgatttttcctatgccgagactgtaaccaatgctttgaatgaggcttatcccgatgtaaaaatcgtttacatggtgtcagatgaccatgaccgcaaagtcctgcgcaccgccgattccaacaaggtttaccgtatggtcaccggcaactacaaccccggcgactacacatactataacgatggcaccggcctggaagccggcagcttgttgctggccactgacgcccagtatgcagcaatgcctgcagaactttcctcccgcttcgtcaagacggatatgccccagttctggctgtatcttgacaaaaccggttacagcaccaacgatccccagccttactcggtgtattattgtgccgacggcggcattgatctgaccagcctgcccgttactgactgatttgtgggaactttcgcggacgttccatttgacaccggccgcgatcccatatatcatagaaaaaaccaaaccaataattcaggagtgtcgtttatgaaagcacgcatccccaaacatcgcgaattcatcattgattttccccaggacgtccccgcagagaaggccaacgagggctgggacaagctgatggccattgtggaggactacaagaagtcccacaacggtcagtccgtctactcccccaccttcatcgaggactgtgagcctgcggtcaaaaagctgcaggaagagtacggcttcaactacaaagtcgaggaaagcaagtgatccagacccgggcaggccgcaaggcctgtccgggttttgttttgccctttttggccccaccttttggcagaaaggatgtccggggagcaaggttcgggtttttatcgcgattttctctccttataaaatccttagaaactcctgttatgctgttgcacagaggaaaaaccactgccgcacaatgcccgtatcctctccggtgcacaaaactgtacgacagatggatttgcccaaatacaggagggatttcttacatgacaaacgcgatcaccgcccaccgggggctgtcgggcacccagctcaagctcctcgctctggttttgatggtgctggaccacatccattactttttcgggttcaccggcctgatccctgacgccttttccatgctggggcggctgtccgcgccgctgtttctgttctgcacggtggaaggctttgcccatacccatgaccgtgcccggtatttccggcgtatctgggccatctcggcgggaatgggccttgtactgtttttgatgatgtacgccggggtgggtgtgcgccccgacggatttttcccgcaaaatgccatcttcatgaacttcgtcattctgatccccatctggcagggcatcgattggctgcgccagcggcgcatcgtccggggtctggcggcggtgctgctgcccctgctctggccgctgctgtttatggtactgtatcagctttccactgccggtcccgccgcctgggcgacggactccctgctggcgctgatcgcctacacgctgctgcccgcctggttgctgatcatggacggcggtatcttctttattctgatcggcattgccctctacctgttccggcagtgccgccctctgcagtgggcggccttcgtcgtgctgaccatgctgtttgattttgtccgcatcgtggccgtgctcggcggcagcgagggctttgccataagccagatgttcaccgattattacgagtggttcggcgtatttgcagtcgtccccatgatgttgtacaatggcaggcgcgggcgtgggctgaaacagctgttctacgttttttatcccgcccacatttacttactgtatgccctgtcctgggggttgtatctgattttgaactgacagccggcatcaaggccggaggagggtcgtgttttggcaaatatacttgcggtggatgacgaccgcgatttgtgtgctctgctgcgcaccgcactggagcgcgacggtcatgtggtggaggtactgcactccggcagggaagtgacggaacgccactgtgcctgggcggactgcatcctgctggacgtgatgatgcccggggaggacggttttgccgcctgccgccgtctgcgcgtcctgaccgactgccccatcctgtttctgaccgcccgcaccgaggaagcggacgttctgcgggggctgggtctgggcggtgacgattacctgtccaagcctttccgggtggcggagctgcgtgcccgggtcaacgcccatctacgccgtcagaaccgcacgcccggccaccgcatccggcggggcggcgtgacctttgacctgaccgcctgcgaggcctgcgccggtgagacgcctctgcgcctgacccgggcggaatacgccatctgcgaataccttgccctgcatgcgggtcggaccttttccaaagagcaaatctacgaggcggtgttcggctacgacggcacggcggaggattccgccataacggagcacatcaagaacatccgcgccaagctgcgggcctgcggtctgcagcccattgagacggtatgggggatcggctatcgatggaaaaacgagtaacgcgtccccgcactctgggcgggcttttgttcggttatctggtgcgcaccgggctttgctgccttgccatctgcgggctgtggttcggggtggtgctgctgctcatccaggccgggatcgtgctgcccgccaacagtgccgccaccgccgccctgcaggcggaggatctgatgtccgagatgtccgccgaccattttgacgccgatgccctgcccgagctctgccgctgggtactgctggacaccgacgccgccccgggaagcaccgccgtctccgggcaggtcctggacaccaacatgaccgggagcgagctttccatggcgctggagctgggcagcccgcctgtcaatcatctgtattaccgggacgtacgtctgatcgacggcacgctctgccggctgcaatacagtttttcggtcccctatgccgaccccgtcctgcggcgcacactgcccgattttcagctctgctggctgggggtcctgttcctgctgctggccgccgtcattttcttgatgacccgtcgtaccgcgcggctgctcaaacgggacaccgccctgctcaccaatgcctgccgcagtctggcgggcggggacctttcggcgcaggaactgggccatgccagaatccgggagtttgaacagtccctgcgcaccatggaaaccctgcgggacgagctggcagcctccctcaaagcccagtgggccatggagcagcagcgcagcgaacacattgccgccctggcccacgacctgaaaacgccgctgaccatcattcagggcaatgccgaactgctggccgaggaaccgctgactgacgcccagcgccgccccgtggatgccattctgcggggggccgaccgtgcggggcagtatcttgccgccctgcgccgtaccgctcagaccgtgcagtcccccgccctgccggaagctctggacgccgccgtcctggcggaaagcctgggcgagaccggcgccgcgctgtgtgcgccgcggggcgttgccttccgcctgggaaaccgcctttcctcccccaccgtgctgtacgcccgccgggaggctttgagccgggcggtggaaaacctgctggccaacgctgcccgctttgccccggaaggcggccacgtgaccctttgctgccgcagcgaggacggcgccgtcctgttctcggtgcaggacgacggccccggctttcccgcggacattctgcgcggcggcggcgagtggctgcgcaccggggacgcttcccgctccgacggccaccagggcctggggctgtcctttgcccgcactgtggccgaaagtcacggcggcagcctgcttttgtccaacgaaaacggcgctcttgccctgctgcgcatcccgctgcaaacagatatttcctgacaaaaaagccgccccgccgaggtccgtaacgggaccctgacagggcggtttttgttttcagatcagatgtcccgttccccggatgcaccgtccaggtgggccacatcatagggcagggcgtattccagcagggcgcagacatcctcccattcaacggtgccgtccttggtggtgccatccaagacgcggaccacgatccaggggaaactggtcgcctgcgcactcacctggtcctccagatagctccaggcaaaatagttcgaacctgaaagaccatttttctcgtactccacccacatgatactgaaaggctgggtcgcggtatcgtagaagttggtgtcggggtacagatccggatattcgttgtaaagttcctcgtaatacccctcgatcaggtccagatcgttttcggcgatggtggtgaacatctggtagctgaccgtgcggtccagctcttcattatagaactctacccggtcgtagtcgctgtcggacagttcatagccttccggtttgacaatatccatatagtagctaccttcccggatggtatacgtcccgttgccgttgtccgggttgccctgggccaggcgctccgactgtgcggcggcggcactggcttccgctggcagcgcggggatctgctgcggctcataggaagtgtagtcacagaccatggtgaaatcaccgacgctgtaactcaggccggtaccgtccatcaggtcgttcatcaccgtgtccagacccagaacgtcgcactccatgcggatgggcagataggtgtccttgttcacatacatccgcacgtcggcgctcacggcggaaaagtccagaacgtcctcggtcatgtcggaggcagcctgaccggctccggccagttcccccatcatattgcccagcagggggcgcagggcatcccccgacaccgttcctaccaggcagaccgccggcaccccgtccagttcctttacttccttatcaaaggtcagggcttccgggtcgtcaaactccaacgtcaggcccgcctgcaccatggaggaatccacctcattgcacagccagatcccgcccgtgtggaggtactgcatcactttgccgttttcctccagaagatagctctccatggacaggggcacccggacgcccatcatctcgtaacccatttccagttccatgtacgcctgctgagggtccggggaatagatcaggctttcttccagggaaacggtggtatccacttccagccccgcaacacccatggaaatatcgatctgtcccgagaggttcgccgccgtgcagggcgttctggccatggtttccgccacgcgctccgccgttctggcaggcgtcatggggctgcatccctgcaatgacagcatcagcgccgcagccagcatacccgccgcagcgtgaaggctcctccgcttcatatgatcctctccttttcccgtaaccggaacatcatacacatcgtataaggagattgtaccatggttttcacagtttttccatattatatacacattttacatagtgttttggtatttttatccattaccgggtgcgaagccagtattcccccatgctggcaccgggctttccggtgacttcatccgccagatattcccgcagagcgggggtatccggctgccaggcaagggcctgcgcctcggtgggatattcgatctcggcgtagaaaaaggcccccggctggccggcatccacctgattgacttccagtgtcaggccgtcgggcagagcgtagccccggcgcaccttgacgatcagcggcttgccgatcaggtgctccagccggtcaaacagatcgggagcaatgtcggtctcgatttcctcccgggagagcgttccctcccccttgaagcaaagcacatgccgggtgggaccgccggtcagcgcttcccgccggatgcgcaccgtggggcggacgctgatgtacccctggtccatgcggtattcctcggtgcaggtcagaccttccggccagcctgttaccatccatttgcgttcgatctccataaagtactcctttcgccgtgggcgcggcaccgttcctgactgtcagtttcctttattatagcacgccggtatcgctttgcggggaatgggtctgactttttgccgttgtcttgcgtattgggcagcaaaacggtatactgataccgattgattttaagaataagaaaaggacgactgcccatgaaaaccgagcgtgaatggcctgccttcaccgtttccaaaaaagccgcggccagcctggccgccggacacccctgggtctatgacaacgagatcacccaggctcccgatccgctgcccgctcccggcggccttgccgacgtcttgagccccaaaggcagctatctgggcactgccatgttcagccctgccagccgcatccggctgcgggtattgagccgcaatgccaacgaccggtttgatgcgccgttctggcgccgccgcctggaatacgcctgggcctaccgcaagcaggtcatgggcgagaccgactgccagtgctgccgttttgttttcggcgaggcggattccctgcccgggctgaccgtggaccggttcggtcccctgctggtcacccagatcaccagcgtgggcatcgagacccgcaaggacatgatcctgcccatgctggcggacgtcctgcgtgccgacggccagcgcatcgacggcatctttgaacgcaacgacctggccctccgggacaaggagggcctgccccggggcaagggctggtatgccctgcccggcgaaccgctgccccaaagccccgtgaccgagatctgcgaaaacggcgtctactatgccgtggacgtggagaacggccagaaaaccgggttcttcctggaccagaaatacaaccgccgggcggtggcacacctggcatccgggcgcaccgtgctggactgctttacccacacgggcagctttgccctcaatgccgccaaaggcggggcggcccacgtcacggcggtggacgtcagtgcctcggcgctggagatggcccgccgcaatgcggtgcgaaacggtctggatgaccggatggattttgtctgctccgacgtgtttgagcttttgcccaagctggaagcggaaggccacccctacgatttcatcatcctggacccgccggcctttaccaaatcccggtccacggcggccagcgccatgcgcggatacaaggagatcaacctgcgggccatgcggatgctgccccggggcggatacctggccaccgccagctgcagccattttgcccccgcccccgagtttgtgcggatgctccgggccgccgcccacgatgtgggacgctctttgcggcagatcgaagcccgccagcaggcccccgatcaccccattttgtgggaagtccccgagaccgattacctgaaattttacctgttccaggtggtctgacagctctcacagcccgcgcagcgggtgcaaactatggaaatgcgctaattttttccgttacatttccgctgtattttggcaatgcgcctattgcgttttagccccacggccgatataattatcacataaacagcaagggcgctgcgaatgtgagattcgcagcgcctttgttagtttccagcagtaaaggagtatgaagtatggcagcaaccgttatggaactctacggcagcaaagtcttcaacgagcatgaaatgcgcgagcgtctgcccagttcgacctacaagagcctgaaagcgaccatcgaaaaaggccagcccctggatctggatgtggccaacgttgtcgccagcgtcatgaagcgctgggccattgaacagggtgccacccattacacccactggttccagcctctgaccggcaccaccagtgaaaagcatgacggttttgttgcccctcagcatgacggcaccgccatcatggagttttccggcaaggaactgatcaagggcgagccggatgcttcctccttcccctccggcggcctgcgcgccaccgccgaggcccgcggctacaccgcatgggaccccaccagctacgcctttgtcaaggatgacgtgctgtgcatccccacggcgttctgctcttacaccggcgaggctctggacaaaaagaccccgctgctgcgctccatgaaagccatctccgaccaggcccgccgcgtgctgcacctgttcggcaaggatgtggaccaggtttccaccaccgtcggccccgagcaggaatatttcctcatccgcaaggaagactacgagaagcgtctggaccttgtcctgaccggccgtactctgttcggctctgccccgtccaagggccaggaactggaagagcattacttcggcgtcatccgtccctgcgtctccgagttcatgaaagaactggaccaggagctgtggaagctgggcatccccgccaagaccaagcacaacgaggtcgctcccagccagcatgagcttgctcccatctacgacaccaccaacgttgccatcgaccacaacctgctgacgatggaaatgatgaagaagatcgccgcccgtcatggcctggtctgcctgctgcacgaaaagccctttgaaggcgtcaacggcagcggcaagcacaacaactggtctctgggcatcgagggtgagaaccttctggaccccggcgacacccccatgcagaacctgcagttcatggtctttttgaccgccgtcatcaaggcggtggatgagtacgccgacctgctgcgcacctctgtggccacccccggcaacgatcaccgtctgggtgccaacgaggcgcctcccgccatcatctccatcttcgtgggcgaggagttggaggccgtcatcgacgccatctgctctgactccccctacgccggtcccgtcaagatgaagatggacctgggcgtggatgtcctgcccaagttcagcaaggacaccaccgaccgcaaccgtacttctccctttgccttcaccggcaacaagtttgagttccgtatgcccggttccaccgagaacctgtccgacgcgaactttatcctgaacaccgctgtcgccaaggaactgcgtgactttgtggaagccacccaggatgccgccgatttcgagtgcgcagctgccgcctgggtcaagaccaccctgaacgagcatcgccgcgtcatcttcaacggcaacggctataccgaggcctgggaagtcgaggcagaacgccgcggcctgcccaaccgcaagtgcacccccgatgccatggtggcgctgaaagaccccaagaacatcaagctcatggaggagttcggcgttctgacccgcaccgagatgctcagccgctacgaagttgagatggagcactactccaaggtcctcaacatcgaagcccgcaccatgctcaagattgccaacaagcagctgatccccgccgtcacctcttacatgagcgacgtggccggcaccgccgccaccaagatggccgtcagcgaatccatttccacccgtgccgagcagaagctgctgaaccagctgtcccagtacgccgacgagatgtccgactctgtggacgaactgcagaaggtcgcggatgaggtctccgctatgaccgacgagaccgccaaggcccacgcctaccatgacgtggtgatccccgccatggccaagctgcgcgccagcgccgatgcggccgaggagatctgccgcgaggattactggccgctgccctgttacagccgcctgctgtattacaccgagtgatcgcaggcatactgagctgacaggctaaggcgcaggccaaaaaaaaacagccattctccttttcctatttcttacaccagctcggagggcccgccatcgcgggcctttcgagttttgggtgattaccggcagcacgtccccgtcccggcggctgccaggcatggaggttcaccatgaaacggactgcacaggatatcctgaactttgtggaggacaacgacgtcaagtttgtccggcttgccttttgcgatattttcggcaaccagaaaaacatttcgctgtttgccagcgagcttcccggcgcctttgagcacggcgtctgctttgacggcagttccatcgccggcttcatgaacaccgaggagagcgaccttgtgctgtggcccgacccggacaccgtctgcatcctgccctggcgtcccgccgagggccgcgtcatgcggatgtactgtgacatcaccctgcccgacggcaaaccctttgagggcaactgccggggatatctgcagtcggtggtgcggcgcgcccgggccatgggcctggtctgcaatgtgggctgcgagtgcgagttctatctgtttgagaccgacgaccacggcaatcccaccaagatccctctggaccggggcggctactttgatattgcgccgctggacaggggggagaacatccgccgggagatctgctttgccatggaggacctgggcctgaaaccccagcacagccatcatgagagcggccatggccagaatgaggtggatttcctctatgccccggccctgcgctccgccgacaacctcaacaccttcaagagcaccgtcaaggccattgccgggcgaaacggcctgttcgccagctttatgcccaagcctctgcgggatcaggcaggcagcggtctgcacgtcaacatctccctcaagcgggacggcgaaaacctgtttgccggagacattcagcccgacagcgaagccgggcacttcattgccggcatcctggcccatgcccgggagctgacggcgttctgcaatcccctgcccaacagctacgcccgtttcggcagctgcgaggcgccccagtatatcagctggagccgccagaaccgcagccagctggtgcgtctgccctccgctcagggagagctctgccgcatggaaatgcgcagtcccgacccctcctgcaacccgcacctggccatcggtttgatcctggccgcgggcctggacggcatccggaacaagctgcctctgcccgagccggtcaaccgcaacctgtttttacattccagcacccagggtctggaaagcctgccccgctccctgcgtgaggccatcacggtggccgccgagagcgagttcatctccaacgaactgccgctggccctgctgaacaaatactttgagcatcagacccggctgtgcctggactacgagaatgcccccgaccccgaagcctgggagcgggaacactgcttccccatgatctgaacgccgcgctgtccccgacagcaaacctttgccgaaaggagggacccggatgcctctggcattgatcgcatccgccggtgtcaacgccaacgaatacctggccaagcacatcgccgacctgggctatccgcgtccggtcattgtggccagcggcggcgaagcccgccggcgcctggcggagaaggattttgagatcgtggtcatcaatacgccgctgcccgatgagttcggccatgaactgggcagctatgcggtggaatcctcccatgcgggggtcctgctgctggccaaatccggcacggcggagcagatctcgggcaatttgcagcaaaacggcgtgctggtcttagctaagcctttttccgcggcacagttccgccaggcagtgcagatggcttccagctgctgccgccgcctggctcctctgctggaggaaaatgcccgccttgtggacaagatcgcccagctgcgtctggtggaccgcgccaaatgcatgctcattgaaaagcgcggcatgaccgaagccgacgcccaccgcctgatcgaaaagcgggccatggatacccgcaccagccggggcgaggtggccgccgccctgctggacgaggaggacgacgagctctgaccgtccccttgccgcaaaaatacttgtgtgcgttccgccaaggccgctcccgccgggtgcggcctctgttttggcccggagcgccaaaaacctgtttttcgccctgtccggccggtttgaaaccgtccgggctgggatatgatatatttcaaattggtataagatggggaggatgtgtatatgtctaccaagtatatctttgttaccggcggagtcgtctccggtttgggcaagggcatcacggccgccagcctgggccgcctgctcaagacccgcggcctgaaagtcgcgtcccagaagctcgacccctatatcaatgtagaccccggcaccatgagccccttgcagcacggtgaggtctttgtcaccgacgacggtaccgagaccgacctggacctgggccattacgagcgtttcatcgacgaaaacctcaacaaatactccaacctgaccaccggcaaggtgtactggaacgtcctgcacaaggaacgccagggcgcgtatctggggcagacggtacagatcatcccccacatcaccaacgagatcaagagctacatctacaacctggccaagagcaccgaggccgatgtggtcatcaccgagattggcggcaccaccggcgacatcgagagccagcctttcctggaggccatccgccaggtgggggtggagcagggcgccgaaaactgctgctacatccacgtggtgctggtgccctacatttccggttcggacgagtacaaatccaagcccgcccagcattcctgcaaggagctgcagggcatgggcatcacccccaatgtcatcgttctgcgcgccgacggcagtgtgggcgccgacatcaagcgcaagatcagcatgttctgcaacgtccgccctgactgcgtcatcgagaatctgaccatgcccagcctgtacgagtgccccctcatgctggatgccgccggactgaccgacgtggtggtccgccagctccatctggagaccccgccctccgacctgacccagtggaaggaactgatctcccgcattgccacccgcagcaagacctgcaccatcgctctggtgggcaagtacgtcaagctgcacgacgcttatctgagcgttatggaaagcctgtaccatgcgggctttgaaaacgagtccaaggtggacatccgctgggtggacagcgaaaacctgctggatcagcagcgctgctccgaggaattgtccggtgtggacggcatcatcatcccgggcggtttcggcgaccgcggcatcgagggcatgatccaggccgcccgctatgcccgggagaaccgcattccctgcttcggcatctgcctgggcatgcagatcatggtcatggagttcgcccgcggggtgctgggctatgccgacgccaactccagcgagttcacccccgacggcctgcacaatgtcatcgccctcatgcctgaccagcagggcaacattcccaagggcggcactatgcgcctgggcaagtatccctgcaccatcacccccggcacccgcatggccgcctgctacggccggaccgagatcgacgaacgccaccgtcaccgctacgagttcaacaacgatttccgggaggaaatgcagcagaaaggcctggtcattgccggtaccagccccgacggacgtctggtggaagcagtggagctgcccgaccgggagttccacatcggcgtccagttccatcctgaattcaagagccgccccgaccatgcccacccgctgttcaagggctttattgccgccgcgctgaaataccagtgcgagcgcctgcagcgtgaacacgctgccctccacgaaaccgtctgacttttccgcgcccggatgcccgcccttttgcggccttccgggcgcgtttttcatctccgcgggcctgtctttgggacaaagacgagatgtaaaaactttggtttgtctgtaaaattttctgccctcttgcaaaatcacagccggctgtgtcgtatggatggatagaagtcctgaaggagcggaccgccgtccgtacccgctgccgggcggaatcttttcgggcagaatcacagattcacgcctggccgtgcaaaattccttgtataattttgtactacactccttggggacgatgctgtataatatggatacccgggagcgcccttgccccggccacaaaaaaggagctgtactatggttacctggtgtaagcgccatcccattcagttcatggcgctgtatctggttttctacttatcgtttttcaccctgctggaacgcagcattgtgcccaccgtgattttccactgtgcgctggatgacatgatcccctttgtcaaatatgccatcatcccgtactatctgtggttcggctggatcgtctgcacgctgttctggctgctgtggtttgcgcccaaacgggaattctggcggctgtgcctgcctctgttcgcgggcatgaccctgtcgctgatgttctgcgccatcgttcccaacggcgtctcgctgcggcctgccgccatcgagggcaccgacatcttctccaccctggtccgcggcctgtggagcgccgatacttccaccaacgtctgcccgtccattcacgtgttcaattccgtcacgctggacatggctttccagcgctccaccctgctggccaaacccaagtaccgtctggtccgctggggcgcgcatctgctggatgtgtccatcgtgctgtccaccatgctgctcaagcagcactcggtcattgatgtagtctgcggcattgtgctggccatcgttttggaccgcgcagccaccgccgtctccgtcatgctggaacgccgccccgccgtgctggcgccggccgccgaacagccccatgcagccctggaacacgaataacctcaattccccgctttccgccgtgagagcggggaatttttgtcgtgatttgcctttaccccatggcccgtttgtgctatactgtggacaaagaagcagctgtttccgtttgttgcgtcggcaacagcgcttcgggctatcacaacgtatactggttataaatcatcgcggggcgggcgcaccgtgtttttttgtgtgtccgccctccatatccacagggaggtttcaaagcatatgcattgcacccatctgattgcggccgatacctggtatgtcggcgcaagcgaccgccgtctggccaagttcgagaatctgttccccattccccgcggcgtttcctacaactcctacgtgatcgttgacgaaaagaccgcgctgctggacaccgccgattcctcggtgagcgcccagtacctggagaacaccgctcatgccctgaacggccgtggggtggattatctcatcatcaaccacatggagcccgaccacgccgccaccatcgcggaagtgctgctccgctggcccgaggctcagatcgtctgcaacgccaagaccgtccccatgctgaagaactacttccccgctgccgccgagaagatcgacgctgcgctgctggtcaaggaaggcgacgtgctgtccctgggcagccatgagctgacctttgtcatggctcccatggtccactggccggaagtcatgctgacctttgacaagaccaccggcgtcctgttctccgccgacgccttcggcaccttcggcgcactgaacggcaacatctttgccgacgaggtggactttgcccgtgactggctggacgacgcccgccgctactacgccaacatcgtgggcaagtacggcgttcaggtccaggctgtcctgaagaaggccgccggcctgcccatccaggtcattgcaccgctgcatggtcccatttggcgggaaaacctggcctggttcctgggcaagtatgacctgtggagccgctggcagccggaggacaacggtgtcgttgttctgtacggcagcatgtacggcaacaccgccagcgccgccgaggctctggccggcctgctggcacagcgcggcctgaagaacatcgccgtgcatgacctgtccgtcgtggataccagcgaggctgtggcagagtgcttccgcgcttccaccattgttctggctgcccccacctacaacggcggcatctatctgcccatgggcgctctgctggaggacctgaaggccctgtccctgcagaaccgtaccttcgcgctcatcgaaaacggcagctgggctcccatgtccggcaagctgatggcggagcgtgtgggcgagctgaagaactgcaccctgctggacacccgcgtcaccctccgcggtgcgctgtcccccgcccaggacgccgatctggctgctctggccgatgcggtcgccgcgacggtgcagggctgatcccataaagaacggctgcgggcggaacgcatttcgttccgcccgcagattttttgcccgccggattcatttataactgtggaggatgccatgccggaagttgaatatcaggaactgcgcaaccgcgtcatacgggaaaatccctttatgacctacaaccacatcgaggtcggcccggtgcgtcccgactacgccgaagtctccatgaccatctgccgggaaagcaccaacatctatcatgtggtccatggtggcgcctttttcaccatggccgactgctgcgccggcctgtgtgcgcgcaccgacggccgggattacgtgacccaggacgccgcggtgcagtttatccacaatgtaagcgaagggaccgtcaccgcccggggcaatgttctcagccgcggcaaacggatctgcctggtcaatgtggacatcaccgaccaaaacggcaccctgctgttccacggtaccgtcaccatgtactgcatccgcccctgattttccaccgattcaacagcatttcaaaacgccggacccctgtctgctcaaaagcaggccggagtccggcgttatttgtttatccatattcaaaaattttcgtcagtcaaaggaccgcagctttcccgcggaatataacgcaggggcagcatatggacctccgggccggtatcccgcccttccatccgctccagcagcaggcgcagacattccgctgccatctgctccatgggcatctccactacgctcaggctgggggtggagtacacatcctgctcctcgctgccgttgccgatggcaatgaccttgggccattggtcccgggggatcccactttcccacatagcccgtatggcaccgtgggcgatcatggcggagccgcagaacaccgcgtcgggaaactgctccggcgtgctcttgcgcaggcagcggcgcaccgcctggtaaccgcccgccatattattgtcgcaatagaccgtacctgccatttccaggccatgggccgagccttccagcacaaagccctgcacacggacctccatgccttcgaacacgggcgggcttgtcagcaccatggcacggcggcagccctgatccacaaaggctctggccgcaagcgctcccatgtgggcgtcgtccacgttgacgctggtataccccggacagacacggttgtacaaaaccgccgggatcatcaggcgggtgtcttccaggaaagacatatcggcatagctggcgttgcagatcagcgctgcatggcagtcgcaggtactggtcagggcacgcatatccttgagggcgtcgttgttatagggatagatggccaggcggatgggccgggtctggcggtctatctcactgcgcaggccctgcagaaagcgcaccatcatctgcgcgcggaagtcctgcgcccagaacaccgccacctgcagttcctccgccccggcgccgccccgcaggctgcgcgccgcgatattgggacggtagcccaactccatggcggcctgcatgatcttctgctgggtctccacgctgatcttgcgctgttccgccttgcctcccagcacgatgctgactgtgctgggggaaatgcctacccgctgtgcgatctgtttgatggtgaccataccgtcccctccttccccgctggatgttgctttcctatcccggtgcggccgccatgccaaacatcctagccgcatccggttctcactcgcagtttttccctgtaccaattatatcctttttgccgcccgcccgcaaccgtggaaggggttccgcggccatccttcctgccgcattccttccggattgtgcaaaacagacaacccggccgggcagcagctggacagttccgacaaagtttttgttcgcagacaaaaaccttgccctatcgccttgacacaagtataacgatttactaaaatataggtacaacgtattactacaacgtgatacctatttctttcaatgaatcatggaggcgtgtgtatgaaaaaaatcgcgattggcggcggtcagggattctggggcgacagccccgatgccgccgtccatatgatccgccgggccgacatccagtatatgagctgtgattaccttgccgagctgaccctgtccatcatggcaaagcagcagctgaaagacccgtccaagggctacgcccccgactttgtgacccgtctgctcaagcaggccggcaaagaagcctgggagaaacatatccgcatctgcaccaacgccggcggcatgaacattaccggctgtgtgcaggccatccatgactgggccaagggcgagggcatgaacggctaccgcatcggctacgttaccggtgacgacatcaaggccaagatcccgcagctgctcaaagacggctggaccttccccaacctggactacgacggcaacttcaacgacattctggataaaatctacaactgcaacgcctacatcggccacgaaggcatcgaggcctgcctggagcaggacgccgacgtggtggtgaccggacgtgcggcggacagcgccctcttcctggcgcccctcaagcacgagttcggctgggcggccgacgactgggacaatctggcccggggcatcatggccggacatctgctggaatgcggcggccagggcgcaggcggcaactacatgtacgactggcgcagcgttccccgcatggatgagctgggcttccccatcgccgaactgaccgaggataccatggacatcaccaaggctcccgactgcggcggcatcatctgcgagcagagcgtcaaggaacagttcctgtacgaggtcctggaccccgccaactacatgacccccgacgtcaacgtggacgtcagccacgccaccctgacccagatcggcgacaatcgcgtgcgggtgggcggcatcaagggcaagccccggcccgacaccctcaagctgtgcgtgggctaccacaagggctggaagaccgtcagcatgctgagctttgcctggcccgacgcttacgaaaaagcccagtactgtgccgaggtcatcatgaaaaagatgaagcgcctaggcatgaaagccgacgacgtccacatcagctacatcggcctgaacagcctgcatctgggcgtggccgacatgagcgaggaagcgctgaaaaatctgaacgaatgtgtgctgcgcatcgccgtgttcagcgaggacaagcgcgaatgtgccaagatcatccccgagatcagccccatgcagctcaacggccctccgggcgcttccttcttcggcggacgggctcacgtacaggaggtcatggccctgtggccgaccaccgttccccgcgacgccctgaacatcgagagccatatcctggaggtgaagtaacatggcggagatttatctgaacgacattgcccacggccgcagcggtgacaagggcgacaccagcaatgtctgcgtatttgcccgcaaacccgaatactatgccatcatcgagcgggaagtcacccccgaacgcctgaaggaatactttggcgacatggtcaagggtgagatcacccgctatccggtccccagcctgggcggtttcaactttgtgatgaagcacgctctgggcggcggcgccaccatgagcctgcgtctggacagcctgggcaagagcatgggcagcgccgtgatgcggctgaaaatccacgtggaggacggtgaactgtgatgccccaacacggcgcgctggaaaatctgaccatccttgatctgacccgcgttctggcagggcctttctgcaccatgatgctggcggatatgggcgccaacgtcatcaagatcgagatccccaacggcggcgacgatacccgtgcctatccacccttccgggaggaaaacctggagggtgagcgggaaagcctctactttgccaacatcaaccgcaacaaaaagggcatcaccctcaatctcaaagcccccgagggcaaggaaatcttcaaaaaactggtggaaaaggccgacgtagtggtggaaaactaccgccccggcgtcatggacaagctgggcctgggatacgacgtgctgaaagagatcaatccccggctgatctacgccgcggtgtccggattcggctgctacggcccctaccatctgcgccccggctatgacattctggctcaggccatgggcggcatgatgtccatcaccggccccaaaggcggcgctcccacccgggcgggcagcgccctgggcgacattctgggcggcttgcatgtgaccatcggtatcctggccgctgtcaacgcccgcaccatcaccggcgagggccagcgggtggacgtcagcctgatggacagcgtcattgccgccaccgaaaacaccgcgctgaaatacctggaaagcggccagcttcccccgcgcatgggcaaccgctacgccgcggtctccccctatgacggcttccgctgcaaggacggcaccgtcatcatcgcctgcggcaaccagaaactgtatgacaagctgtgcaatgagatcctgaatcgccccgacatgatcaccgatccccgctttgtggatatgcccggacgactgaaataccaggacgacatccaggtagtcatcgaggactggctcaaggacaagaccatgaacgaggccacggacattcttttgtcccacggcatccccgccgggcctatcctggacatcagccagatcctggccgacccccatgtcaaggaacgggaaatgtttgtggagatggagcatcctaccctgggcaacatcacggtcaacggctgcgccatcaagctgatgggtacgccccccgcggtgcgcacccccgcccccgccctggggcaggacaacggcgagatctaccgcgatctgctgggcctggatgaagcgcagtatgacgccctgaaagaaaagcacgtgttttaagaagaaattctttcgcaatccgaaccatcttacaatttgagacaacactctgagcaacggaaaggtcaaggtgattattctatggcgatgaagctcaccccctatgagcaggaaatgctcgacggcaagcacggcgaagccaaacagttcgccatgcgggtcatgatgaagatcggcgagccgctgggggcgcaggaatttgtggaagtcgtctcggtacaggcgatggcccacttcggctctctgcacattgcaggccgggactatatgcgcaagctggcctgcatgggcggcaagtgctgcgtcccctgcacccaggacccggcctccatcccatgggacacctgggaggagatgggctatgacgccgagtacgcggccaaccaggccgatctgtgcaagtcggtcatgcagctgggcgaataccatgcctggtcctgcaccccctacgtccagggcaatgtcccccgcgtggggcagaacgtggcctgggcggagtcctcggcggtcagctacgccaactcggtgctgggcgcccgcaccaaccgcacccccgccggtctggctgtctgcgccgcgctgaccggccgcatccccaagttcggcctgtactttgacgaaaaccgcaaagcccaagtcaaggtcaacgtggatgcgggccccctgtccgatctggactacaataccatcggcatcatcatcggcaagcgggtgggcaattacattcccgccatctacggcattcccgccagcgccaccaacgagaacctgaaatatctgggcgcctgtgcggcatccagcggctcggtggccttgtggcacgcggtgggcgtcactccggaagcgctgcacggcgatccctttgagggccgtgagcccatcatggagttcaccatcacccgcgacatgctgaccgagaccgaaaagagcctgtgcaccaagaatcccggcgaggtcgatctgtacgtcaccggctgcccccacagttctgtggccgagatcgtcaagctgcatgagctgatgaaaggccgccgcgtgcgggagggcaaggatatgtggatctttaccaccgccgaggcctgcaacatgatgcgccgttccggcgtggtgggtgacctggaagccgccggcgtccgcatgatggtccagacctgtctggtcatcagtccgctggtgggtaacggcaagtacaagaccctgatcaccgactcgggcaaaaatgccagctacctgcccagcgaacacggcatcgagctgatttacgcttcgatggaaaaatgcgtcgaagccgtcacggaaaaagtgtaaaggagggcgcggaacatggcaaagaaaatcattcttcacggcagagctctcgcgcccggcgtggtggagggcgaagcccttgtgagcaaggaatccctggtctggtcccacggcgtcaacccgcccaccggccgcatcgttgacgtgcgggtggctgtctgcggcgaatgcgtcaaggacaagatcctggtctatccccttggcaaaggttccaccgcctccgccacctggattttggagaacacccgctgcggcaatgcacccaaagcctttttgaaccgggagacggagctgatcatcctgtcgggcgccgttctttccaccgaactgtacggcgtgaccatcccggtggtggaccgcctggaccagaaccccgacgaagtgatcgagacgggcgactgggtcaaggtggacggcgaccgcggtatcgttgagatcacgaaaaaagagggttgagtttggcgcggtttccggagcggcacggcgtgccgttccgggaccgctgccccgatgtcaaaaacataatataaggcagcccggcatttttctgcggaatggactcaaaaccggaccggtaccccaaacacagctcccggctgttccgcaccccgtgttttgaatctgttccgccaatgccggacccgtaggaggaaattatgacgtcacaagtaattttcaccatggtgacaattatcatcatgttcattctgatggtcaccgaagtcatccccctgcccgcaaccatggcccttgccggcgtcgccctgtgctttgccggcatcgtggagccggcaaagctgtactccgaatggggcggctccaccatcatgttcctcatcctcatgtccatcatcgtggacgccctgacccagaccggtatcgtccaggacctgagtgacaaaatctttaccggaaaactgatcgaaaatcagcgcgttgccatctttgccgtgtgcattttctgcggcgtggccaccggctttttgtccaacactgccctggtcgtcatgatgatccccgttctggctgccatggtcgtcaagtccaacggggcgctcaagttcaagtacatgctgctgggcgcggcaacggaagccaccgtgggcggctccgtttccctgatcggtggtgcccccaacctggccatgcagggcgccttggaagaagccggcgtggagaccatgggcttcttcagcgcggcgcccctctccctgatcctggttttcattacggcactgtatttctccaccattggctaccccctgatgcagaaagtctgcgactttgacgacaccgagatcgttcgtcagaacagccagaccgagaaaatcatctgccccctgtggaaaaaggccctgaccctcattgtgctggtcagctgcatcgtctgcttcattatggaagtgaccaacaaccagctggtctgcttcatcggcatcatcgtgctgtgggtttccggctgcgccaaacccaaagagtccctgaaagccgttgactggaataccatgtgggtcctgagcttcgccctcgtggtggctgccgccgtcaacaccagcggcaccggcgcttacattgccgacctggtcctgaccgcctgcggtgcggagaatgccagctataccgtggttctgatcgccgtctgcctcatcggcggcgtgctgacccaggtcatgtccaacacggccaccaacgccatgttcggccccatctgcatctccattgccctgtccctgggaatttctcccctggcactgtgcgttcccgtcatggtcctggtcaactgtgcggtcatttctcccctgggttccccctgcatgaccgttgctctggccggcggctaccgtgccaaggattacctctacgttggcctgcctctgatgctcattcttatccccaccggcgtcatcggcgcgctgctgatctacgggatctgaagcaatggacacctactttcaaaatgcggcatccggctgggataccccgcagcgggtccgccgtgcccagtgcattgcacgggagctgcggcagcatattcctttcccccattgcaagctggctgtggaatacggctgcggaacggggctggtcggtctgaaccttgcggacatggccgaccgcctgatcctgaccgatcccgagccttccatgctggatattttgcggcaaaagctggaacttctgcccgccggtctccgtcccgagctgttctgccagccccttgacgagcccctgccccgggagctgcactgcgacctgatttttcactccatggccctgcaccatacccgggacgcaggccgggcactgcgcaacgcctttgatgccctggttccgggcgggtgcctgtgttttgcggacctggacccggaggacggtcacttccacgatgaccaccccgactttcacggctacaacggttttgaacagaccgaactgcaagacctgatgcgggatgccgggtttgtggaggtcgcctcccggacatttttgcaggacagcaaatccgtcaacggtcagcctcatcccttctcgctattctggatgtgcggcctgcatccctgacttcgatactctcttcccccttttgtcttcctcgcaccaagcagaaacgggacgccccataacagggcgtcccgtttctgctttctgtttttaatgatttttgtttcggccacagtatctccgattatttgatgccgctcaatccaaagggatcattatccccggtcagaccgtcggcagagagcattttctccatcacgtcaatgtctgccgatacatccagggcatcatcctggaacagcttgtccagctggttctcaaaggcgacgaccagggtgtccatggactgctcgatgcggcgcttggactcccggatattggtgccctccacgccctgcgcgtccagctcggcgtaagtatccagcagtttgagggaggtgggcaggtagtagtccataaacttgcgcatctggggcagtttatcgggattctcctggatgtgcgcaaagatcttggcggaaactgcttccagccggctgatcttgtcgctcatgttttcatcggggatggcgtcgttgacccggcgcagatcctgcaggatcttctcatatttctcgttgccctccgccggcttttccgcagcctgttccggagcgggctggggttcgggatcatttttcggttccgggggaacgccgcgcacgatcagcgcacggctgtgcatgtccaggtaagcaccggggccaaaggtcccctttgcaatgcagttttccagatgaccgtagcagtcctgctcactgcatcccagggatgccgcaatgtcctccacatacatgtgatcggcactgcccacgatgttggcaattttgcggcgtttcagccaggaggtgcgcattctgcgggcgccgatgcaaaggccgagaccggtcaggaagaagatcaccagcggccagacttcttccagataccaggcgacatcccgcaaatcggtcaggatccacaggttttccagcagttccgcgccgccgcccaggccgccaatgaccataaggaccacaccgatgataaacaggatatccgctttgctcttgtcctccgtgccggtctgcgccgcctgctggggcgcggtataggcgggaggcgtctgctgataccggttctgcgccgggtttgcgtacggcgtctggttccgggcggggttttgccttaccgactgattgcggtttgaattggctgcgctttgctttaagaccatgttgaccacagccagcacaattcccagcatggggaatgcaaaaaaggcgatcaggatcacccaccaagggatgctgaaatgtccgtcccgattaaattcccggcgcaggctgttgccgaagttggccggattctgtcggttatacggacggtagggattctgcccattcatacgattgcgataaggcgttccctgctgatagcgcggtccgttggtcggctgctgtccgcggctgcgttgcttgtcctcgtcatacggttggttgggcattgctttcacgttcctttttggttgatcaaaaatcacgaaagatccgagatgagctccttccactcatcggacaggtagtaggtgcttcccacctgatagggattgtccttgtcatagggcacatgggtgcagagatagtccacccatgccgagtatcccgtgcccgaaagatgcaggccgtccggctgcgcataatcggaacgcagatacccgttttcatccacaagagcctcgttcagggcaaggtacaggcagcccttttccgccgccatcgtgctcagggaagcgttgatggtgctgactctgtccggggaaagtcccggcatatctgcctgtgcgtcggcctgcaccggcagaaccgactgcacatagatggtggtatcgggcagcgccgcgatcaggtcatccagcatgcggccgtaatagttcaaaaagccctcgtcattggtggtggaatacgccaggctgttggcgcccagcagcacatacagctttttgggctgggcctgcgccagaacatcgagggggatctcctccccgcgtacatcgctggtcattgtggtgcggttgacgatgtcattgggggatgcgccttcatacgcgcagaccagggcatcgcccacatcgatgctgtattcggtatagcccaccgtgagggagtcgcccaaaaatgccgcgtcgtcaaaccagctcaggtccaccttgccgaattccggcactgccgaaggagtctcgggggcggcagtataggtgtagttttcggtctggcgggtggggcccacatcaccccaatcaaccgtctcggcactgctgccggaatccccctgataaggcagcggcgctaccacggagttggtcagctgggtggtgtctccatcctggatcaggtcgtccgtttcgttgctgtcagcgggcaggaacgccgtgatcacgcccgatgcgatcaggatgcacagtcccgtcccgatcagggtcaaacgccggcgcatacgccgtgcctggcgtgctctgcgtgctgcggcacgcacggcctgccgggagggatccgccgcaggctgctgagcagtgcggggaggctgcggggggctctgccacccgtcagccgcatcggcagagggcggcgcatagggtgcgcggtaaacattcttgggttccgcagaaggccttgtgtcaggcttccacacctgctggacaggctggctgcccggcgtgacccggcgtaccccgccgctgcccggcgcttttacctgacggttgcgcttttcttttggctgatacccgccgtaaccgccttccttgtttggcatatgcctgtcctcccttccgtttttgcctttcggcgccgtgccgaaggctgaataaagatattatatcatatccccgcgcgtaaaaacagctttttgcccgcccggtctgtaaactttcacgaaacattgcttctgccaaacaaaaacgcctccgcatctgcggaggcgaaaaagctcaattttctttggggaagcggctgttgaaacgatccagggccagggctcccaccacaccgacggcaaggcagatcaggtttgccgccaatgcgcccgcggaagccgcaaagctggcgaacggaatgatcatgatggttgccgccaccacaataccgatgatcgcatggaaggcacaggaataatagtggttgaacagcgcatcaatgcccttggccaggcagatgatcgtaaccacggcccccagcccgccgggcagcagcacgttcatatccagatggcccaagccatccacaaagggcgtgtacagtcccagaggcatcagcagggtggagaagctcatacccggcgcaatgacgctgagggccaggcagaagccgcagaacaggtaccagccgaagttgggctggatctggaccgagaatacattgagcgtgatcagcagagacaaaacgaccacgaacgccacgatcatggaaatgtaggaaccacgggtgcggccctgttccccggcctcacggaacagagagggcagcattccgacgatcaggcccacaaaaaggcagaccgactgatccggataggtctccagaaaaaaggcgagaagattggcaatgcccagaaatccgattgctccgcccagaatgaccggcagcaagcgcggcacatgggttttgaagttgcgcaccggattggacagcagttccatcaccggcttgtaaattccaaaaataacgcacagcacgccgcccgagataccgggcaagactgcgcccaggccgatcagcaccccctgcagcagacgcatgacaaaccgtacgacaggctgacgtccaacggaagaatctttcataacaacagtaccctttcttgtattcacctgtacgcagagcttttccctgcggcgaggttcgttccattatatcataccaattcccgtatggaaacctcctggcctgccgtatattggacgaagaaacaagattttttgtgagatttgttcaagaaattccgctgtccggtccggactgccggcggacgcttttccttgactttcacttttcccacactttggcccttgtaatcgcggcgggtacacgttttcatccgcgttttgggctgcttggagttggtttctttttcccggcagccgcagaccgcccggcaggccattggtcctcccaacgctggcggagagtctccagcgcccgcttttcaatgcgggatacgtagctccggctgatgcccagccgttccgccactgcctgttgggtcagttctccttgcccatccagaccatagcgcagggtcaggatacgtgcatcccggggcggcaggtcccggaccagagtccgcagccgccccgcaaggtcgcggcgctcgcagtcctcctccatgattgcgtcatcgggcaggacatccgcaagtgtcagcgttccgctgtcattaccgctgctttccaaaggttcctgcaaggaaagcggcgttccctcccgccgggcgtggcggaggtacatccgcatctcattttcaatgcactgggacgcatagctcgcaaaacggacgcggcgggccggatcaaaagtatccaccgccttgatcaggccaatggtcccgatactgaccaggtcgtcctgcgtggccgctgccgcatagtactttttggccacatgcgcaaccaaacggagattgtggcggatcagccggtcacgggccgagtgctcaccccgccgggctgcttcaaaggcggcccgctcctcctccgggcgcaaaggccggggaaagctgccggtttccagccggagcgtcagatacaatacatgggcggccgcagcctgcaaaaatagtccgagaatttccagcacaattcccaccccctgtcccaggatatgcaggaaccgtcgcccatatgtgccaaaaaaggacaagaccggtgtcggcccgccatggcatctccgcaaaatgaaattggcaacgttccatgcttagccgaacacctgcataaaaaatcccaaaattccgctactgtgcagcgtgtccggaatacaatgctttccgggggcctgctttggttgagcaagtcttccgggcctgctataatgataccgtcaggaaaggagcaataccatgaacgtactttgtttcggggattccaacacttacggatacgacccgcgctcctggcttggcgggcgctacgcaagggacagccgctgggttgacctccttgcccaaaagaccggctgggatgtcatcaacttgggagaaaacggccggtgcattccccgccgggcggtcaccttcccggcaaatattgatttattgatcgtcatgctcggcaccaacgacctgctgcaggactgtaccccggaacaggcaacggaacggatggagcgctttctgctgagcctgccgctggagcggaagcggattctgctgattgctccgccgcccatgactctcggcgaatgggtgcctgaccaaacgctggtcgaatcatcccgcatactggcccgatgctaccgggacctggccggccggctgggcttccggtttgccgatgccggaaactggaatgtctcccttgcctatgacggcgtacattttaccgagcagggccaccgggcctttgccgatggactttatcaggaggttactcaatgaaacgacttttgcctttgtttttctcttttcttctgcttctgaccgggtgcggcgcaggcggtgcttccgaagaaaagggctaccagcagatcagccaggaggaagccaaggaaatgatggacaaccaggaagttctgatcctggatgtgcgggaacaggatgagtacgacagcggtcatatccccggggccgtgctgctgccggtggggagcatcaccgaggaatccgccgccgaggtcattccggaaaaagacgccaccgtcctggtatactgccgcagcggaaatcgcaacaagaccgccgccaaggccctggccgagctgggctataccggcatctacgagtttggcggcatcaccacctggccgtatgatgtagaacaataaagaaaattgcggtttcctgacggttacgccatcagaatcaaagcccggaaccgggcggcatgcgcagccaccgttagtcaccgttttttcttctgcgttcggataatcacccgtgctgccatgttttttacagtctttccccattattctcctgccctttccggctcttacaatttatggcttgcgttcatcgctcccgcagagcacttgccctgaatgcaggcaaaactttttaacaaaaaatcaagttttccccttgactctgacggtgcgtcaactgctacactgaaaaccgaaggaggcaaacgtcatggaatattccattcacgacttgtcacagctttccgggctttccacccggacgctgcggtggtacgatgagattggtctgctgaaacccagccgtgtagcggaaagcggctaccgctattacggtccggcccaggtagaccggctgcaggaaatcttgatttaccgctccctcggggtagaactggcccgcatccgggattgccttgacgcgccctcctttgaccggctggccctgctgcggcagcacctggccgcgctgcatgcccaaaaggaccggctggaagccaccattgacctggtggcagacgccatacaccgggaagaaaggaggaaacctatgaaagatgatgcaaaatttgctgcactgaaagaacaggtcgtggcagaaaacgaagccgcctacgggcaggaagcccggcagcggtacggcagtgaggccgtagataccgccaacaaaacgctgctgggaatgagcgcttctcaatacgacgcctggactgcactggatgccgaattgcgtcagcggctggaaagcgctgtacgcagcggactttcccccgactgcgaggaaggacagcttgtgtgcacactgcatcgccgctggttggctatgaccgccaaagccttgacctctgccaaacagaaaggtattgcagaactgtatgtcctggatgaccggttcaaggcctattacgatcggggcgtccccggctgtgctcagttcctgagagatgccgttgcccaatgggcaaaataatacagaaaagcagaggagcaaccccggtgggttcgctcccctgctcttttttgtttcaaccacccgctatgtccgcgggacatttccgttgcagggacgtcacttgccgcgcttaagtgcctgatattccgcgggggtttggccgaagctctttttgaaggccgtggagaaataactcagactggaataccccacttcctcggcgatctcatagacctttttgtcggtatgttccagcagtgccaccgcctggcgcatccgcacgctgttgagaaaggcactgaagttcatgccggtctccttggcaaacaggcggctgaaatactcggggttaaagttggccgcctgggccaccatgcccagggtgactttttcccggtaattcttttccaggtacgcgattgcatcccggacaggggccgaataggcttccgtctgcggtgcactgcggcagaagggggcaaacacctcctcgacggccgcctgcagttccgccattgtcatggctcccagcattttctgctcggtctgctccgtcctctggtccagctcttccggctgatcggtggcaaagtgcagcaaaatggtacagaaggaagcacacagctttttgacgccgtccaagtctgtggggcgctcttcccggatgcgctgcaggacttcgtctttaatggctacggcttcccggtaattctgggcaaacagctccttgctgaaattcatgcgggcagtctcggcatggcgcaccgattcccggcccaccgcatcgttcagaaagaccttgcgctccggctcgtaaaaatgcaggcggcagcgggcctgggcttcgtgcagggcggcgggcaattccagcagccctttctttgcatcgctgagtcccagcacacagtcaacgccctctgcctcccggcagtaaaaagccgccagttcttcccgtgcaccggcgtggcgcaggttgcccacaaacaaaagatgctcataccccaggggaacatagcgcacattaacaaggacgtggcagccttccagccggcggcgtgcttcctgcagatcctggccgctgcggctccacagatcccccgccgccagaggcgcgtcctccagggtgattccctgccggcgcaattcctgagcagtcagcggggcggccccctgttccatggccatctgccggatcagcagctgtgcgctctgttccatctgcacggcattgtccccgttgctgcggatggtccgagccgctttgcacagcaggtcccgcatggtctccagcgtgacctcggttttcaggatatactccgccgttccgctttgcagggcgcggcgggcatagtcaaagttatcatggctggtcagaatgatgatgtgcgccgggcggatggcctggatctgggccgccatctccagtcccgacataccgggcatctcaatatcggtgacgacgatgtccggcagttcccggcgatacagttccaggccctgcgtgccgctggccgccgatcccgccagcacaaacccttccagctgaccgatgcaatattccagccagcggcggatggggctgtcgtcatccaccacaagtactttcagcatagattctccttattttcgggcgccttttcccctgccgggatgcgcaggatgatccgggtccccattccgggctggctttcgatcttcaatccccaggccgggccgtagtgcagccggatacggtcattcacgttcttgatgcccaggtggggacggtcggtcacttcgggggcttccatgacctgccgcaccttctcgggcgtcatgcccacaccgttgtcctccacctcaatgcagaccgcatccccctgacggcgggcaatgacggtgatcatgccgctgccgctctgcatatcaacgccgtgctggatggcattctccaccaagggctgtatcagcagtttgggcagcaggcagtccgccgcggcgtcgtcatattcgatcatgctgtcaaaggcgtgctcgtagcggtattgctgcagggtcatgtactggcgcaggctttccatctgctgggccaccgtgaccatctcttccggggtggacaacaccccgcgcaggatctggatgaacagcgtcagcatggaagccgcatcctcgttgcggtgcatatccaccatgcacttgacggaaaacagcgtattatagatgaaatgcggattgatctgcgcctgcagccagttcagctcaatgcggcgtttctgctgttcgttctggtggatactggtgatcaggccgcggatgcaggacatcatatcggacataccgcgggacagttcgttgagttcggtatagctgcggatggcaaagtcctggttgaggttgccgtgttccacgtcgtgcagatcgtcccgcagtttctggatgggcgccgcgatctggcgggagaaatgccacgccagcaaaatgccgcccgccagggaaagcagcgcaagcaggacgaccacccgctgaacgttgcgcagcggctgcaggacctgatccagcggggcttcctcaaagacggtgaagccgctctcggagtcatggtatcgggtgaacagcaccggttccccctcggcgcgggtgatcatgtaatctttaccgccgaacagcgtttccaggcgctccatatcgaaatagctgaatccgatgagcttgctgcggctgctggaaatgatctggcccgcatcgttggtgacgtagatgttgctgccatcccgcatgacatcctcatacatctggtagagctggcgctcgtcggcgttgatcatgagaaaaccgacaatattcccttccccgtccaggatggcccgcgccgccgagaaggacgccgtccccaggctgcggtcccggtaactgcccacgtccacgatctcgccgtcggcttccaccacgctgcggttccacactttaaggcgggggtccatatagtcatagccctccggcacggagcgggagcaatatcccacccccgaggtggagacatacaccacgtaaaaatccaggttgggctgcaggaaggattcctccatctgacgggtgatgctgtccatcaggacaaaaaattcctcttcattgtcggcgttcagggcctcggcataggtgtggaatgccggggtgctctcaaacaggttggacagggtatacaggctggtcttgaactggcggctgcgctcggcgatctggcgcagaacatcggtccgggaaccggccagttcccggatgaagctgtcctgataaatggagtaggcccccaccgacaggattccgatgatcacgatgttgacacacagcagcatggccatcatccgcacgcggatgctgttccaccagcgcccgacccgtgttttttccacaatgtcctccctctctgaactccgccgcagcacgttctaaccgtattatacaaaattgccggcccgcgcttcaagactccccatacgcccaaaagctcgccggcaaaatgccggcgagcgatgggttgggtttgttaatatttgccgatacgcagcggcagggtgtcctcggtctcgatgacccggtccagcagacgacgcagcaggttctgcttgatctcggcatagtcgggatcgtcccagaggttcgtgaactcgttgggatcgcggtcgcggtcatacaattcgccgaaggtctcgcccgcgtaataggtgagcttgtagtggcgtccggtgatggtcttgacgttgagaccccagtcgtagcaggtgaactcggtcagggcgtactcacgacccgcgccgccgtcgccccgcaggatgggcgccatggacatgccctgcacgccgtggggggcgcgaacgccggcaaagtccagcagagtgggcatcaggtccacatgctcggtgatctgcttgtagcgggagcctttggggatgacaccgggccaggacatgatcatgggtgccttgatgaggcagtcgtagtggaacggccccttgaagagcagcccgtggtcgcccagcagttcgccgtggtcgttggtgaacaggatcagggtatcgttctcgatgcccttgtcccgcagcgcctgcagaatacggccgacgttttcgtcgatcaggctaatcataccgtagtaggcagccttgacctgaccccattcgtgatcggtcaggcggcgatagtcgtatttctcgttgctgcagccctgtcccacacggtgacggcggaagtgcgggggcttatcctccagctcgccgtcctgacgaacgggcagcgccagcttgtcgggatcgtacatggtggagtagggcgccggcggatcgaagggatgatgggggtccacaaagctgcacagcgcaaagaaaggctgatccggcgtggactcattgatcaggtcgatcatccggtctgcgatccaggcagactgatggtacttggggttgatgtcgctgggatacacctggggcgggccactcaggtccttatcggcggcgctggcgcggtcctccttggctttgcgctcaccctgcatcttgacgatctcgtagtccttctcgctcttctccttgagccaggtcaggtactcgccggtcttgcagtcgcaggtggtgtgcacaatgtcaaagccgtagttatcctcgggccagtcgtcctcctcgttctccttggggacgaactgcgtggtaaagtgcatcttgccgatggccgcggtcaggtagccgttatcccgcaggacttccggcaggcagatctcggaatcccgcagagggatgccgttgtcacgggtgccgtggtttttggggtagcggccggtgaggatggagcaccgcgacggagagcagacagggttctgcacaaaatggttgtcaaaggtggaaccattgagggcgatgctgtcgatgttgggggtatggatctgattgttgccgtagcagcccagcgcgtcaaagcgcagctgatcggccatcatcaggatgatattgggtcttttgttcatattgcttaccaccacttgatcagatcggtgactttgtcgcgcagctggttgaaggcgatgtcggtcacatcacggggacggggcaggtcgttgacgatctcctgcttgatgccggtgggtttgttggtcagcaccaggatacgctcgctgaggtagaccgcttcctcaatgttatgggtgatgaagataacggtggtgccggtgtgctgccacagacgcagcaggtcgtcctccagcttgtagcgcagggagttgtccagctggccgtaaggctcgtccatcaggagcagttcgggctggacggcaaaggcgcgggcaatgctgacacgctgcagcatactggccgacagctggttgggatagtagttgcggtattcggtcaggccgaccatttccagcatttcatccacccgggccttgatctcggcggcggggcgctttttgatcttgaggccgtaggcgacgttctcctccacggtctgccaggggaaagcggagtactcctggaagatgtaggcgacgttgtgcttctgcaggtcgacgggctcattgttgatgaggatctcgccgctggtcagctggtagacgcccagtttggtcaggcagttgaggaaggtggtcttgccgcagccggtgggaccgacaacgcacaggaactcgccttttttcacctcaaaggagatgtcgttcaacaccaggaggtcgccgaactttttggtcatatgggaaactttgaccttgacttcgttgctgctcatgggctgcctccttacagggtgtcgtcgcagatctcttcgatcttgcggcggatttcgaggaacgcggggtcactgtactggcgcggacggggcagatcgaccttgatctcctccttgatatgggtgggagtgttggtcaggatgatgatgcggtcggccaggtaaacggcttcctcactgttgttggtaacaaagacgacggtgcgcttttccttctgccagatcttttccagctccgcctccatcatgtagcgggtctgggcatccaggtggccgaagggctcgtccatcagcatgaccttggggtcgttggcgtaggcgcgggcaatgcccacacgctgacgcataccgccggaaagctgattggggaagctcttctcaaagccttccaggccgacgagcttgatgaaatactcggcgcgctcacggcgggtctttttatcgatgccgcggctcttggggccgaattccacgttgcccatgacggtgcagaacgggaacagagcggtggtctggtaaacgacgccgcggtcagggccgggagcggtgacctttttgccgtccacgacgacctcgccggaggtgggcagctgcaggcccgcgatcaggttgatcatcgtggtcttgccgcactggccgggtccgaacaggaccacaaactcattttccgccacgtccaggctgacgtcgcgcacgacctcgttggtcttgtgctcactgatataggttttgcacacgttccgcatggaaatgatgggatcgtgcttcagttctccatgatgttccacgagcagagcctcctctcaatggtgcgcatcagcgtagccagcagcatgccgaccaggccgatgacgatcatgccgaccatgaccagggtgatgttcagcgtgtcactgccgcgctggatcatccagccgcagccttcctgagcgccgaccatctcggcggccagaacggccatccagctggtggacagggccacctgcatgccggcaaagatctgcggcgtacaggagggcaggatcacccggaagaagatgtcccgctcgctggtgcccagcatacgggcgcagccgatcagttcggggtctacgttctgagcgccggtataggcgttgagggtaacgttggtgaatgcgccgatgccgcacagaatgtacttggaagtttcgccgatgccgaagaacaggatgaccagcgagatccaggcaatggggggaatggggcgcagcagctcaaaaatgggcttgaagatggcttccgcccagcgggaggtgcccatggcgatgcccagcacgatgccgatgatggtcgctaccgagaagccgaccagaacacggcgaaggctgaccagcaggtggccgatgatgaccttgttgccgatgggggtgtagaaggagctgaccagcagctgcaggacttcgatggggccgggggtggtctccttgaccggggtgaaggtggtcaaaaaccaccacagcaggaagaagaaagcgatggccgccaccgcatagacggttttttccagatcgaatttgcgtttcatcctctacggcctcccttgacgaatttcttttccagagcatccaggcctaccgtaaagacggtgccgatgacgccgatggtgagcatggcgacaacgatcaggtcggcgcgggccagcgtacggttgagctggatcatgtagcccaggccgcggttggacgccagcatttcagcagcgcacagggtcatccacgcggtgcccagggaaatgcgcaggccggtgaagatcaggggcagcgcggtggggatggcaacggtgaagagcatctcgcggcgggaagcaccgaaagtctgggcgacccacaggtgaaccggcttggtctgcttgatgccggcgtaggcgttgatgacgcagggaacgaaggccgagacaaagatgatggcggccttggcgcccaggccgatgccgaaccacaggatcatcagggggatccatgcgatggtggggacggggcggatcaggtcaaacagcggggtgacgaacatatccactttgcggaaccatgccatggcaatgcccagagggatgccgatgacagcgcccagcagataaccggtcagggcgacctgcaggctggccaggatgtgaccgcccagggtggcgccgtccggtgcggtctgggtcagtttttcaaaaaaggcttccacgacctgcaccgggctgggcagaacgtagtccggcttgaggtgcagcaccgcagtgcacagataccagacgccgaagaaaacgcaaagagaaatgaccgagacaatgccgaacttgattttttctttacgcttttggattgcgtactcgttcaaggcggatctctcctttcaagtggagagggcggccctcctccggaaaccgggtaaagggctgccctctggttgggacgagaacgatcagaagccgagagcttctttcacaatgctgtcgtcaacatgcttggcgatttcggggaagcggctctcttccagcagctgctgggaaacccagaactcaccggtgatctcgacggactcgccgatggtgatgcccttagcctcttcgctggtgacgaagggacgggtctcgatctcggtggcgcaggcttccagagtggtctcgctgccgttggcggtgtaccagtcgagcagcatctgagcggccatgtcctgatccgcctgcagagcatcacaagcctggaagaaggccttgacgtacttgacgagcacgtcgcggcgctcggtgtaagccttgttggaaacgatgatggagtcgtactggggaacgcccaggctgctcaggctggaggtgaccacatagccttcgctctcagcggtgaaggaggtgggcgggttcagagcggcgacgtcgcagttgccggtcttgagagcctggtaagcggcggggaagtccatgctgacgatctgaacgtcgtcgggggtcaggcccagaacttccagccatttgttgatgttcaggtgagagatggtgccggtgctggtggcgatgaccgcgcccttgacggtctcggggctgcccagaacgtcaggataggaggggttggtgccggtcgcctgcgcgatgggggaatcggggctgaccagggtgtacagaccgccctcggagtggccgatgtcggcgatgcagtaagcaccgtagatggccagagagttgacggcggcggcgctcagggtgccgacctcccactgatccgcagccagcgcctcgttcatggcgccgccgttggagaagtagaccgtctcgatcttgaagccgttggcttcgtccagcttgttctggaccatgtactcaatgggcagagagttcaagaacggcatgaccgcaactttcagcgtgggcagatccccagcgtcgctggttgcctcggtgccgccggtctcaccggtgccgccggtggcggtgctgccggtgtcgccgccgcaggctgccagggaaagcgccataacgccggccaggaaaagcgaggtaagtttcttcagtttcatatccttcttctctcctttttggatattgtgcggaggtgaaccccgtccgctttcgttgtattcatcgtaacatgattttgggggtgggtaaattctccaaacagacttgcatttttgtttttttgacgcagttttttcacaattatcacgtatttcacaaccgtctctccggtttgttgtgcattttgtcaaagcaatatccgaaatcaccaaaaaaagccccgccgcttttgtcattggtcaaagcggcagggtatttttcaatattttgatgtcagtttgccaaagattttttgacacggctcaccgagcggatgtacagaaccagcagtttccagcatccgtaaccgagagcgcacagcactcccccgatgacggcgctgagggcaaacacaaggacaggattgctgacgccggcgatgccaatatactcgacatagggcaagcccagacgcagaagatcattgagcatccgcagtatcccggccagcggcgcggcaacgccgcacaggaaaaacgccggcgcacagatccccagaacgggaatgaccacaatgcccgaaagccccgtcaggctgtaataggcacagatcgccagcacccgcccccagctgaaagagtgctcccgggcgatcaggtcccccaggtaggccctggccagttccttggggctgcccaggcggcggaggatctcctccggtgtccggccctgttgctgcagttcctccatctcgctcttgatctcctgcacgatatccacgcgctccgccaccggcaggggcttgagatttttttcgatgcgttccagatattcattcagctgccgttccatcgctgtaccctcctttgatttcttcgatcgcggccagtaagttctcccattccccggacatggacgccaggtattccgccccggtggcagtcagggaataatatttgcggggcggcaggccctcggcgctctcctgccagtacgaggagatgacgccctccttgagcagccgccgcaaaagcggatagatggtgttctccttggcggcaaggatggggtatcgctccagttccgtgatgatctcgtacccgtaggaggggcggcggcggatcatcagcagaatgcagaactccagcgtgccgcgcttgatctgggatttccagtcatccatattcatatgctgtgcctcctttatatacatcgtaccacacagtatatcaaacgtcaacagtatcttgttaaaatgttgggggaatgtatccgccgaaacaggtttcacggattatttacaatctgccgcttgaccagccgccgccatgcagtgctacactatagataacaggtcacgcatccccggcgcggcccaaaccttcaaccgatacaggagggaacgtttatgcgcaaaaactttggtgcaaagccctggacttatccgcagccggtctttatccttgccacctacggcgaggacggtacccccgacgccatgaacgccgcctggggcgggatcagcgaagccaatcagctgaccatgtgcatcagcgccggtcacaagaccaccgccaacattctggcccgtcgggcctttaccgtcagcatggccaccgcggaccaggtcgtagcctgcgactatgtgggcatggcttccggcaacaatgtcccggacaagctgagcaaggccgggttccataccacccagtcggactttgtggacgcgcccctcattgacgagctgcccatggccctggagtgccgcctgatcagctatgatccggaatcctgccgtctggtgggcgagatcgtcaacgtcagcgccgacgagtcggtgctggatgccggcggcaagatcgatcccgacaaattgcagcccatcacctttgaccccatccacaacgcctaccgcaagctgggcgagaaagtgggcatcgcattttctgacggcgccgctttgaagtaaatctttttccacagaaaaacgccttcccggccgggagggcgttttgtcatatgggggaaatcgtgcatcctggggccgccatatcgccgcttgggggcaaagcgattgcaaagccgcccctcccctgttatgctgaacacagggaggtgaagcccatggaactgcagatcgaaccgcggcccggtgccgtccgggtgatcgtacagggtcccgaggacagcgaggaggtccggcgcatcctggcactgctgcaaagctgcggcgacaggttgtgggtactggacgaccagcggcgcaccgtggccattgccccggaaagaatcctgtgggcggagacggtggacgaccgggtctttgtatacaccgccggggcggtataccaggcggcctgcagtctgaccgcgctggaactgcggtgggaatccgtggggctgttccggtgcggcaaatccaccgtgctgaacctgaacgcggtgcaaagcctgcgcagccgccccgccgggcgcattgaggccgtgctgcaaacgggagagaaaatcatcatttcccgccggtatgcccctgtgctccgggagaaacttcagggaggagactgatatgaaaacctatctgcgcatctatcgctggtccatgcagatgaaactgcgcatgggcctgtacactttcactgccatctttttgaagatggtatgcaatctgctgatgggggtggacagcatccccatccgggaactgctgaccatgtggctgacctgtctgctgttcgccgtgctggaatctgccatcttccccgagaacagcgaatgcaccggggcgcggacggctctctggctggcggcaggcaacctctgcttcatcggcggggccgtgctgttcggctggttcgcgggggttcccgtgtggggcggcgtgatccttgtcctgtttttggaactgggactgggcctgatgtggttcggcgaccggttcgtcctgaaaatggacagtgcggaactgaccaaacagctccggcagtaccagggccgcggcaaagcctgattcgttcttttgttttatattatagtatataaggcatctcattcccgcggcggctttggctgccgcgggatttttgcaccataaccaacggttaagaaaacttgcccggggcctgattacgcctcccttgtgacccggcggcaggcgcggtacaatacagatacagcaaaccgcggcgctgaattcagaaaagagaggcaccctatatgcaacgagcacagagtgagatcggcgcgaacatcgccgccctgcgcaaggccaagggcctgacccaggaacagcttgccttccggctgggggtatccgcccccgccgtgagcaaatgggagacgggcagctcctgcccggacatcacgctgctctgccccctggcacgggcactggataccaacgtggacaccctgctgcaatttgaggaaactctgtccgaccgagaagtgacggaacagatcaacggcatcctgcaaagcgttaccgagggcggctcctgcgaggaggcggaagcccgcctgctggaacttttgcaccgttaccccaactgcaccgcgctcaaattcaacatagccatcgcctgtgacagcctgcagatgtttttccccaccacagacgaggacacccaagcccgctggcgggagctccgccgccgtttgatggaggaggtccgctccgccggcagcgccgcctactggcaggtcgccactttgcagcttgcctccatggcggtcaacgacggccagctggacaaggccgaagccctgctgcgggaactgcccgaccatgtgggagaccccaccagcatctgggcgctgtaccacctgaaaaaagaggagccggacaaggcgctggccatcacccaaagccagctgtacaagctggtcagcggcatccagctttgcctgaccactcttctgaatcccaagctgctgcccgaaccggaacgtctactcaaggtatgccgggcctacagcatgatggctcaggctttcggccttgcggacatgagtgatggtttgcggatggagatctacctgcgaaacggtgaccccggccaagctgccgactgctttgcccggtatgtggagaccctcaccggtcccctgccctgccttgacgccgacctgtttgccccggggctgaactgttcgcccaacccggcacagcaggcccctgcaaggcagatgcggcttctgctgctgaaagggctggaggaggaagaacgctaccatcccctgtttgaggaaccggtctttcttgaggcactgaaaaaactgcgtgccagcgtgtgacccatggatttcccgcattgtcatttgctcgccgcccaagtataataagttacaagaagagagaaaccgttctttttgcatgggttgcgaacgtacaaagaagtgcggggctcctgcgctggctccataaaaaaggtaaaccgttttgccgcgctttgatgttttgtgcttttcccggattttcgttttcttgcggcgcgggcggcttcctcatttccgatgaagcgacacgcagcggaatttgcggccgattttctctcggttttcctgattctatggggtatgacaaaggcggggatttccatgaaactgaaaaaagtctggatgtcggaggacaccgggaaaaagagtcactacggcgtgcgcaccataggcggcgtgctgggcattgcggcactgatggtgctgctgatcctgggcggggtcctgctgacgttttatctggatcttccccgtgaggtcacttccctggggttggtatgcgccgtgacctttttggccgtcatcctggcgctgcgtctggggcggagcgccttgcgggacgccacagtgtttttcctcacgcaggatgaccgcctgtatgccatggatgcccgccttttgattcctcaagagcgttccctggccgggcagatggaaggagccgccaggatacaggattatctgcgccggctgtcccagtctccccatatccccgccggagccacggaaattctgaaagtggaacgtctcaaagaaaacgcctcccattacgccattgtctgccaggcccgccatcccaaccggaacatcactctgttcacctgttttgtggtcaagggcctcccggatgaggaccttctgctccgggagctggaacgccgccaaagctggcagagcgacctagagcccgctgccaaccacaatccgttgggaattctggtcagcgggctggtgctggcggggtttgccgccctgtgcgtattgagccatccggcggtgggcagactgccccaggccatttactttccctgcctgggtgccgctttcctctcggtgtttttcctggtgtatttcatcatacggcagcgccggggcgaatgaccgtcctgtcaggaaaacgggcgaaaatgccgtcttgggttggtagccttttgtccgccgggccggtatactggtaggcagacaacagcaaacagggaggatatgaccatgagtttgggaagcagcctgtaccacgcccgcaagaaaagcggcctgtcccaggaaaacgtcgccgaaaagctgggcgtcagccggcagaccatctctaagtgggagacggacgaaacgctaccggacattcgtcagtccaaagggttggccacgctctaccatgtcacgctggacgagctgatcgagtacgattttgacgaacagcaggcccgggagatgatcgacagcgtcagcgacgaagcccaggcacggatcgactggaacaaggtctggagcaaaaagtacccggtccttgccacctaccacgagcgggtgcgcatttccgactacgcccccgccctgggcgaaatgctgacccggctgcgggtggaatacggctacaacaataccgacgccgttctggttttgaaggacattctggcaagggtatggaaaggccagctttgaaccggcgtcccgcctgcgccgccgggcaagccgtcgtctgtccttgaaaaatccgcctttccatggtatcctgatgctatgataccataccaaaaaggaggttcttccatggcaaacgagatggagcttgacaacatcatcaccctccaggacgaaaacggcgaggatgtccggtttgagtttctggacctgatcgaatacgagggcggccgctatgtggtgcttttgccggaggatgacaccgacggcgaggtcatcatcctgaaagtcgaggatctgaacgaggaggaagaaagctacaccggcgtggatgacgacgatatcctgaacgcggtgtttgccatcttcaaggagaagttcaaggacgaattcaactttgaggactgacaccataggataaaaagccttccgtgtggggagttttccccgcccggaaggcttttcatttatttatgggagcctgctgctcagaacaggcggcggcccgctgcgtatttggcgcaggggcggtcgtcggaaagatagaccacccgctccaggcgttcctcgagcgtgcagtcccgggtggtgggcagggacgagtcatccatgaccacggcgtcgaactcgtatcccggttcaaagctgcccactttgccgaagaattctccgccgcccttggtcgccatatagaaggcatcgggcagggtgagggcgggggtttcctgatccaccagccgccagcgcagcttggaggactggatggcgtccgtcatggcccggaagatggacaggtgtgcgccgcccgccacgtcgctgcccagaccgaccttctgaccctcgtccagatagttcttgatgggggcaatgccggaggaaacattgatgttggactgggggcagtgggcaataaaaacgccgtttttcttcatgagcgcccgctcttcctccccgctccagacgcagtgggccatgacggtagggcagctgccgccgaacagccccgcctgggcgtaggcttccccgtagaaacgggtgttggggcaaagttccgagacccatcggatctcggacaggttttccgaaagatgggactgcatggccgcaccgaactcccgctgcaactgtcccagcccggccatcagttcatcggtgcagctggggatgaaccgcggcgtcagcatgggcttcaccttggaaaactctttgctctcttccagccagagacgggtctcggacagggattgcccggtggtctcccgcagggtgtccgggctgttgcggtccatgttcaccttgcccacatagcagggcaggcccgcattttccagctgtttcatcagttccagcgtcgcggggcggtggagggttgcaaaaatacaggcccgggtggtggcactgtgcaaaagtgcgtcggtaaaaatggcataagcacgctccgcataacccaggtcggcaaagcggctttcctccgggaaggcgttgcattccagccaatccagcagttccatgtccatgcccagtccgcggtaggcgtactggctggcatgtacgtgcaggtcgatgagccccggcaggatcagcttgtccccgtggtcctccaccgggataccctgccagcggtcgggaagctgccggaacacaccggccacctttccctcctcacagacaagatagctttgaggataaagttccagtttgcccctgcgggcggtatatatgacattgcctttcaaagcaaaggtctgcatggtttgtctcctttgtgcgtattgaatgacgatgctccgcctgtttttgtccaggcacagccgttccatattgtaacggaaagcacagcaaagtacaagggcctttgcaaaaatatcaccgatgccggataaaggcggtttcctgcgatggaaaaagtcattctgttttcctgccggtttccgttttcctgcgccgcctgtccggcatggcaggcccctgcgcatccggcacaaattataggacgcatttttgttaaatccgcgctttttatcgagcactcgacatttttgtcagccgtcaacttccgcattcgtggaacagcctcatacttttttgcttgcactttgcggcgtttccgtttatactaacagtacaaggaaaagtatgcctttgccttgatttcctgtttttcccacggcaggctgccgtgagtatgattgtgaggtggaaccgaatgaagcatgtgatcattacaatggcccgtgaatatgcctccggcggaagcgagatcgctcaggccgtggcagacaaactgggcatccccctgtacaacaaggagctcatcaccattgccgccaaaaagagcggcctgactgaggaagccattgccgcgtcggaaaatcagcgcagcagcagcctgatctacagtctgtacatgatgggcaacaccatgcccctggcggaccaggtctacattttgcagagcaacgtcatcaaggagctggcggaaaaaggatcctgcgtcattctgggccgctgcggcgactacgtcctgcgggaccgcaaggatgtgctgagcacctttgtctatgcccccattgagcaccgcatcgccattgccaaggcccgccccgacgccaaggatatgcccgaccgtctgtgggagaccacccttgccaagcacgaccgcgcccgcgccagctactacaattactacaccgagaatcactggggcgaggccaagaactacgacctgtgcctgaacgccgccctgggccgggacgtctgcgcggagctgatcgttcaggctgcccaggctctggaagcaacgctgtaaacggtacgggaaagcgccttcccgcgggataccgcccgtcggacagggcttgcccgaatgtgctcccataagggaccgcggcaaacaaaacattattctgtcaaactttcggccgggggctcggcttccggccgaaaattttgccgttttgtacggcacactacaaatattatcgctgtaattcaaggagaggacccatgcaaacttcgtacgatctgatcattgtcggcgccggccccgccggtatcttcaccgccctggaactgctgcgcaaaggcagcaaggccagcatcctgctgatcgaaaagggcaaaccggtggaaaagcgccactgccccaaagcggaagtcggccactgtgtcaactgcaagccgacctgtgccatcaccaccggcttttccggtgcgggcgccttctccgacggcaagctgtccctctcccatgaggtcggcggcgaactgcccgagctgatcggcgaagatttcgcccagagcctgatcgactacaccgacaagatctatctggaattcggcgccgatccccacgtggagggcgtctacgaaggccccgagatcaaggacatccgcaagcgtgccatccaggcaggcctgcagctggtggactgccccatccgtcacctgggcaccgagaaggcacaggaactgtacctgaacatccagcattatctggccgaccacggcgtcgagatgatgttctccaccgagtgcgagaatattttgctggacggcaacacctgcaccggcgttgtcatccgcgaaaacgacagccagcgcgagatccatgccaagcaggtcgtcattgccaccggccgccgcggcgccgactggctggaaaagctctgcgccaagcacggcatcgcccacaagcccggtaccgttgacatcggtgtccgtgtggagtgccgcaacgaggtcatggagaccatcaacaatgtcctgtacgagggcaaattgatcggctaccccaacccctggaagaacaaggtccgcaccttctgccagaaccccggcggctttgtggcgcaggaaaactacgacaacgacctggcggtcgtcaacggccacagctacaaggacatcaagagcaacaacaccaacctggccattctggtcagccacaacttcaccgagccgttcaaccagcccattgagtacgcccagaaagtcggcgagctgaccaacatgctgggtgccggccacatcctggtccagcgctacggcgacattctggacggcaagcgcacctgggcccgcgagctggcccgcgccaacgtccgccccactctgaaagacgccgtagccggtgacatcaccgcggccatgccctaccgagccatggtcaacatcatcgagttcatcaagatggtggatcaggtcgtgcccggctttgcctcctccgagacactgctgtactctcctgagctgaagttctactccaacaaggtccgtatggacaccgatctggagaccaacctggccggtctgcactgcctgggcgactcttccggctggacccgcggtctcatgatggcttccgtcatgggcgtgctgatgggccgcaagctgatcgagaatcacggcttctgaattcattcccacagcaaacacataataaaaacgccgccgtcccgcaggcatcaggccacgggacgacggcatttttttatttgtaaaatccttcgttcggtttgtttaggattcctgcatctcgcttggggtggcatttccttcctgcaggtcggcaaagcgggtgcgggcaagttcctcccgcaggtcgggcagcgtgccctcggtcaggtccttcttctgcagcgtgaccgctctgtcggacagtgccagcatcacaaggtcggaggtttcaaaggcatattccagctgctcgtaagggatttcctgcgaaacgtcctcccctgccgccagtttcaatccggtatcggagaaaatcaggcggacggtctgccctgccatctccgtcaggagcttcgccagagggccggcctgctgttcataggggttgccggccttccgtttcttatacacaatggctgcaatgccgatgaccagatacaaaaggcccaggctcatcagattgcccagctccgccgggtccccaaaggaagccatcagaaacaccacgcccagcgccagatgcagcaccgccaggacggcccgtctgcgcttccaaaggcacaaaatccccagcacagtccccacaatgcccaccaccagcaaaagcggaagttctgccggttcggtccaggctgcggccagaagcatggttcccagcacccagtccaccgtccccaggactctcctcacccgggcacggcggtcactgacctgctgcgagaccttctccacccgattcaggcggtctgccagtccccaaagccagggaaggcgctcccgggagtagagatccatccgcttttccagcgcggcagcgatctgcgcccgcgcactctgtccgtcaggtgcggtacagttgaacacaaattctcgttccatctcacattcctcctgccctggggattccgttggcatgagtatatcatattccgtttagctgtgacagcggcggcaaaaattttacacggacagatggctgcgcaaaaaaggggcggcgggaaaaatcccgccgccccttgggcttaccgtattatctgtgccggatcactgcgcagcagaggtctggcccagggtgacgtcaaagctcatgagcttgccgtcacgttccacctgcagcgataccacgtcgccgacattcagtttctggatatagttggtgacgtcgttgctggtggagaccaccgtgtcgccgatggagacgatgcggtcaccctgctgcagacccgcagcctgcgcgccgctgccgtcgctgacactgatgatatagacaccgtagttgctgacaccgtactgcatggcagtctgggcatcctggatggcaatgaccgtcacgcccagagccggacgggcaacatagccggtgctgatgagttcctgtgcaatgctgaccgccgtgttgatggggatcgcaaagcccaggccttccgcctcgctggagtcgctcttggcattgacaatgccgatcagctcaccgttggcgttgaacagaccgccgcccgagttgcccggggaaaccgccgcgttggtctggatgagggtcatttcattgtcctccaccgtgacctgacggttgagggcgctgatgatgccgttggtcacggtgccgcccagggtgcccagcgggttgcctacggcgatcacttcctcgcctacggccagctgatcgctgtcgccgatgaccgcaggggtcaggccggtggcttcgatcttgatgaccgcaatgtcggaagcggtgtccatgccgatgacggtggcctcatactgggtgtcgctgccgttgagctggaccttgacgttggtcgcgccgttgaccacgtgggcgcaggtcaggatgtagccgtcctccgaaatgatgacgccggaaccggcgccgctctgcacatagctgccgccgaaccagaggttattggagctgaccatctgctcggtggtgatgacgaccacgctggggctgaccagagatgccacatcctgggtggaaagcgccgtgccgcccgcgctgccctgggagctggtttcgtcggtctggcgatccaccgtctgcatgactacggtgttgccggccagaccggtgcgggatgcgacgaccgcgcccgcaaagccgctgccaaagcccagcgccacgacgcagatgccggccacgatgcgcatggcgatctttttgccggtccccttctttttctttttgggcggctggaccggtgcgctggtgtagttgtagccgttgtcgctgcccgcatgcatgctgcttgcgtagccgtccgacgggggcggggtctggctctgctgggtggagtagtcagtgcgggcggtgttggcggtgttcatgccgctgctgcccacgttggggtagccggtatagccgttctggggctgaccgcctgcctggctgtttgctccgttcgccgcggtattgtccgccgcgctgttgggggccgccggattgggcgtgccgttgttgggtgcgttgttattttgatcgttattatgataaagtcccgaataatcaaactcgttgctcataaagaccatcctttcctcagggtctaaaggcgggatcttgtgttcctctttcccgatcctttgtgcatagtataccggctaattgtgaaatacgttttttgtcacagtgaaataaatgtgaaaagccgattttgtgcgccgccatcgcaaaagccggtatttttgcattttgcccgtccggcagggctgcaaggctgtcaggccccgcacagccctccggtttgacagggctgccgccccgccttacaataggttcaacaatgctattgtatctggccggagggttggctatgcgtattgaggaacaaatctgcggcacaaaaacgcagtacctattatataaggaacaaacgctcattgggtcggcggtgctggaaaacggccacatcccggccttttccatcgacccgtgctggcgcggcaaaggctacggctgctatctgctgaaagaactgctgcgccgaaacggcgggtttgatcctcagacagaaagctgcttcaccgctccgctgcctgatccgtccgacgccgctgccatggccctggcgaagcgcttcggttttgcggagagcggcgatgtgctgtgccgcctgcgtgcgccggatctgaccgccgtgcggctggtacaccggatgctcaccgatatgctggcccccggcggactgtacctggacgccacctgcggcaacggacacgacaccctgtttctgtgcgggctggccgggccaaagggccgggtgatcgggctggacattcaacccgccgccgtgcaggccaccaactccctgcttgcccaaaagggcatggaacagatcggccgggccgtgcaggccgaccacagcgaccttgcccgctttgccccgccgggcagtgccgactgcgtcatgttcaactttggctggctgcccggtgcgccccacgaggtacactcccaggcggacaactccctgcgggcattgcaggcagggctggatgccctcaaaccgggcggcgtgttgtcggcggtcttgtacagcggcaaggtcatcggcgacagcgaaaagcgcgccgccctggactttttccgcagcctgcccctgacccgctacaccgtgctggtctgccagtttgccaactgggccgaggaggctcccctgccctgcctgatcatcaagcgcccaggcgggcattgagcatagccaggaaggcctgttcctccgccttgtccccaaaagcgtccttggcaaagctgtaagccgccacgccgccgggaccgcacaatacccaggcatggggcgtttccagcagtttcccgcaataagggatctgccagctgctgccccggctatccgaaagcagaatttcctccggcccgaactgcaaggtaaacgtgccgcagatccggtcaaagtccccggccgggcggcgccacatggcgtacagcatgaccgccaccagcgccgccatcatggcaaagccaaccaagccatactggacggtaacgtatcccacacccagggcgatcagcaccagggcgggccatttccgacgccagtacgtgccggtcttgagcaccgcaatggtgcgttcccgcagcaggagccgtgcctgttcccggtccagctgctgcacaaaggtcccgccgccttcgccgtccggcacaaagccggtacgcacagggccgtcggggcttttttgttcctccggggctgcgggtcgggttttcatggccgcttcaaacaggctccggctgtaaggcaaaggcgcttcctcgctgaaggcagacagcggcatcaaaaatcccgctccgctgtgcaggaccagtaccagcccggcacggtcggtctggatcgtccggatggacgccgccgggacatggatgtggcttttctgcccgctcacaccggggccgtccagggtcaggaacccctccgccagcgtgacccggtagggccgggacgtcatttccggcagactgcggcgtaaagcggacatctgcatggacacatactgcacgggcatcagcccccagaacagcagtgccatcagcgccgtaaggatcagcagaacgatcgccgttcccatctgttccccggtgggcaggccccccagctcgatcagggaaaacaccagcatggccacgaccacgaccaggggtactatcagacgcaggcggcgcatctgccggttggcgatgctcccctgcactcgggtcagggcacggaactgagcgcggacttcctgctttgtcatggtatactgccattgcatagggcagcctcctcccacatggttctgtggacattgtaccacgccctttccccctgcgcaaaaactttgtcgcaattttacaaaggcgaagccatcgcagtaaaatcggccgcagcacgggcaaaatctattgcaatcccgccaaaaaccatgtatgataaataggtatgtcttgtttgtgaggagagggaaaatgtaaaacgcatcctgcttcccgttcaggctccgcggcgccgatgccgggccggagcatacggacgaacgaccagaaccggcggagacccgcgtctccgtccgtcgaaataagcaacgcgccgggcggcatcccggcgccaatttgaaggagagaagcagtaccatggcatccatgcgcgaagaaattgaaagccggcgcacatttgcgatcatttcgcaccctgacgccggtaaaaccacactgaccgaaaaactgctgttgtacgggggcgccatccagaccgcgggctccgtcaagggcaagcagagcgcccgccacgccgtgtccgactggatggacattgaaaaacagcgcggcatcagcgtcacgtcctcggttttgcagttcaactatgcgggcaagtgcatcaacattctggacaccccgggacatcaggacttcagcgaggacacctaccgtaccctgatggctgccgactcggcagtcatggtcatcgacgcggccaagggcgttgaggcccagaccatcaagctgttcaaggtctgcaccctgcgccacatccccatctttacctttatcaacaagatggaccgcgaagcccgcgatccctttgagctgatggaaaacatcgaggagatcctgggcatcaagacctatcccatgaactggcccatcggctgcggcaaacggttcaagggcgtgtttgaccgcgactcccgccgggtgctggccttcgagggcgacggccgcgccaacggcgtcaagatggtggacgagatcgccgccgagcttggcgatcccgctctggatgagctgatcggcgccgagaaccaccagcgcctggccgacgacatcgaactgctggacggcgctgccgaggagttcgacctggaagcggtgcacaacggcaccctgtcccccgttttcttcggttccgccctgaccaacttcggcgtcgagcctttcctgaaagacttcctgcgcctgaccccgccgccgctgccccgggccgacgcccccaccggcgagctggtggacccctgccgcgaggaattttccggctttgtctttaagatccaggccaacatgaacaagaaccaccgcgaccgcatcgctttcctgcgcatctgctcgggcaagtttgagcgcggcatggaggctttccacgtccagcagggcaagaacatcaagcttgccaccggcaccagcctgatggccgacgaccgcgccatcgtggacgaagcctacgcgggcgacatcatcggcctgttcgatccgggcatcttctccatcggcgacaccctctgcaccggcaaaaagcatgtgcagtttgcgggcatccccaccttcgcccccgagcactttgcccgggtcacccaggtggataccatgaagcgcaagcagttcgtcaagggcatggagcagatcgcccaggaaggcgccatccagatcttccgcgacctgggttccggcatggaggaagtcatcgtcggcgtggtgggcgtgctgcagctggaagtgctggagtaccgtctgaacaacgagtacaacgtggacatccgtatgcagaacctgccctacgagtacatccggtggatcctgaatccgccggatgagctggaccccaagaccctggacctgaccagcgacacccgctgcatcgaggacctgaagggcaaccgtctgctgctctttgcaagcccctggagcatcgactgggctacccagcacaacgagaacctcaagctcagcgagttcggcaacctgaccttctgagttcggcatttcaaataacagaaccggcccgccgtggagcagatgctccacggcgggccggttttcttttttattcagcaaacaaaaagtgcggccgtcccggcttacgggaggacggccgtactttttatcttgtcatgtcaaggaggcggcagttcaggcgttggccttctccgcgtcctttttggaggacatatatgccttgaccgagctgaccacgatggtcaggcccagggcgatgagcagcaccgcgatgatgagctgcaggccctccaccaggaaggtggcgctgccggcggccacggcctggcacagggcgataaggcgctgcaccagagcggtgaaggtcacgcacagcatgatgaccagcggcgggaacagcatcttgttgctgcggccggtgactttcaggaagacgcacagggtcgccaggacgagagcgctgagcagctggttggcggagccgaacagcggccagatgttggagtagccgatcttggccaggatgaagccgaacaccaaggtaacgatggtggagaaccaggtgttgcagagcagcttgcgccagccctcggcgttcttcatatcatccacgctgaacagctcctggaagctcatgcggccgatacgggcgacggcgtccaggctggtgagcgccagagcggaaacgcacatggtcatgaagcactgggccacatagacgggaactccgaacatttccaggaaaccggcgacgccgttggagaagatctggaaaggagtgcctgcggcgggggtaccatcggcagcagcggcggcgccggcaacgcagagggccaggacagccagcaggctctcggtgaccatggcgccgtaaccgaccttgagcatatccttttcattgtccaccgtcttggaggaggtaccggaagagaccaggctgtggaagccggagacagcgccgcatgcgacggtgacgaacaggatggggaacagcgtgcccaggcttgcgttgtcgaagccggtgtagacgggcaggttcatggaaggatgagcaaccagcaggcccaggaccgcgccggcgatcatgccaacgaacatgaaggtggtcatgaagtcgcggggctgtttcagcagccacatgggcagcgtcgccgcaaagaagatgtagatgaaggtgatgtacagccaggcttccttgcccagggtaatgggcatcagcatgcccagagccagagcagccacggtgcagaccagaccggcaacgatctctttccagccggtgaagtggaacttcttctggaccaggcccagcagcatggcaaagacgatgaagaacagggagatgcagcctgcagcgccgttaggcttggcggcggcggacagctgggtcacaccgtccacgacctcataggcgttgaaagtaccggccaccatatccgcaaaagcagcaatgaccagcagggtgaacagccagcagaacagcaggaaaaccttgcggccgaatttgccgatgtatttttcgatcagcaggcccatggatttgccgtcgttcttgacgctggcatacagggcgccgaagtcggtgacggcgccgaagaagatgccgccgatcaggatccacaaaaggaccggcagccagccgaaagccgccgcctggatggcgccggtgacagggccggcacccgcaatggaagaaaactgatggctgaaaaccgtccagccgtcggtgggaacgtagtccttgccgtcctggaaacggtgggccggggtaacggccttaggatcgatgccccaggtcttggccagccagcgtccgtacagggcgtaggccgcagccaggcagaccgcagcgatcagtacgatgacaagcgtgttcatgattctcttacctcttttctgtttccaccgaccaaatgcagcaaacaaaacaggccttcgccttcagtcccatggccgtttaccggccgggaaccgaagacgaaggcccgatactcctccgcgataccacttcgcttgccgtccgcttgcttggacggccacctctgccgcagccactgccgggctgcgcacccctgtaacggtgggtatccggccgcggctattgcacggcgcgcacaacgctgtgctttctcacctcggctgctggcgggtgagggtccgcggcgcgtttgctgccgcctcgcacaaccggcggctttctgaaagccggctgccacggatcatgtcccgttcactgcatttggtcgatatggcttatactttagtcccctgatttgcagttgtcaataatttcttaacattttggcggtttttctttagtgtactaaaccgggtaaaactttttatgcaaaacgtcagagttttgtttctcatacgaggacagtctttgcaaactgttttctccccacaatcgaatggcagcaaaatagccaatttctttcgcttccattttatcctttatccatgatactcctgctgctttcccctgccctggaatgacggaaaccgtatcccgcagggtttctctgctgtcgttcgtatgcttgtgcagcctcttttcacaaagcaagacatcccgcccatgcggccgggccgttactatatagtataagcggagacagcgccgagactgccggaagcgtccctttcttctgcccgataccggacaaaagagcgtttcccggaagaaaacgatgccggaaaactcaaatttcaaaaaatcgagtttgagaaaacgagagcaaacgagagaaagcaagagaattcaagagcttgtacaggataaatcaaaaaaatcagctttcacctattgacgaaagagcgcggatttgctataatcacacttgcgcaaaacggcgcggcccctcgcgccgcgcttgacgataggtccggggctttcccggccctggattttggatggaggtttacattatgagcactactctcgcaaagcccgcagagatggctgaccgcaagtggtatgtgatcgacgccgcgggcaagcccctcggccgcgttgctgccaaggctgccgtgctgctgcgcggcaaggataaggtcacgttcaccccgaacgttgactgcggtgaccatgtcatcatcatcaactgcaacgatgctgttctgaccggcaagaagctggagaagaagttccatcgcacccactctctgtacatcggcggcctcaaggagacccagtacaagaagctgatggccgagaacagcgacaaggccatgacctacgccgttaagggtatgattccctctaacaccatcggcgccaaggccctcacccgcctgcactgctacaagacctctgagcatgctcatgctgcccagaagcccgaagctgtcgaactttgatagggaggcaatcgaatatgtacgagacaaaaccttacttctacggcaccggtcgtcgtaagcattccgttgcccgcgtccgcgtttacaatggcaccggcaaggtcaccatcaacggccgcgatatcgaggattacttcggcctcgacaccctgaagctgctcgtccgcagcccgctggtcctcaccgagaccgacggcaagtttgatgtcgtcgtcaacgtcatcggcggcggctgctccggccaggctggcgctatccgccacggcctgtcccgcgccctgctgcagtacgatccggctctgcgtcccgccctcaagaaggctggcttcctgacccgcgatcctcgtatgaaagagcgtaagaagtacggcctcaaggctgcccgtcgcgctccccagttcagcaagcgctgattgtttatcccttgttttcaaaagacccggaacccggtggttccgggtctttttctgtctgccgccccctcattaccgccacttgtccccgctttttgcttgtagtatcataaaagtaataagcaggcttccctgctccctgatttttcccgttgcgcgtccctgtaccggttttgaaaggaggtcggctccatgaaagagaaacaaattctcagcccggccacgcggcggtggcttttggctttcgtgctggtgtgggctttgtcctgcgccgcagtgtggacgttggcagttgtctatctgattctgttcttcgtggtgtttcagctgatcgtgttccccgtactcatgttcggcctgtgtgcgtcggcgggctggcatgccgacctgggtctgttccgctggctgatacccatggtattgagccttgtgtacagcatctggccgctgaacatgctggtggcctcccagcctgccccgccggatctctcctatctgattttgggtgcggtcgtctcttatctgggattgatcgtcggaaccatcgtgcgccgggtccgggcaaattccaaaaacagcccctccgcctgaacctttgataagagctcttccgcaaaaaaggggaccttttttgaacaaaatcaagaattttcttcaaaaaagcatttggctcaatattttgtgtacccggctgtttttccttccatcacaggtagattttttggcaaacacgcagaatttccagcccaaatccgacactttggccgttcattttctgctctttttcacgatggtacagcaaaaagttgtttacatctgtgtctttgtgttgtataatagctaaaagttccgtgccgcatcggcgcctgattctgccgctgcggaggatgttctgcgccctgttgaacgggcggatcacaggcatccgttttccaggcagccccatgactgccgcgacaagaggatctttatggttcaaccaaaaacgaaagaacatattcgccgctggttctgtctgaatcttcccaagtacgggaccctgctgggctgtgtgagtgtgctgttcggtgtgatcgcgctgactgcctcccagctgcagatcgttaccgtcagcgactcccacggcaagcgctccaccgtcgttacggcagagcgggaagtggtggagctcattgcccaggccggtatttcgcccagcaacacggcagatgagctgctcgttaccgagaccggcgacaacaactccattcacattctgcgggcctttaccgtccctgtcacggtggacggtcagaccagcaatatcattaccaccggcggcaccgtggaagaggtcctggccgaggccgggatcgaactgggcgaggatgatgagacctcccccgcccgggacgccaccgtcgtcgacggcgattcgatcacggtataccgtgtccgctacgatacatacactgtgcaggaagtcgttcccgccgagaccgtttgcctgtacaccagcctgctctaccgccagcaggacgccgagctggtggtccagtccggcacggatggcctggacgaggtcacctaccgcgacaaatacgtggacggtgagctgacccagaccgacgaactgtcccgggccacgctgaacggcatggtgcagaacatcgtaaagcgctatggcgagggcgttgcagtatccagttttgtaggtcccgaagtggtggacggcgttcccgtggaaggcgtgaccgaggtttacacctcccagcgctcgacggggtactcggcatctgccactgcaaagggagcctccggccgcaacctgacctacggcactgtggcggtggaccccgatgtgatcccctacggcacgctgctgtacatcacctcggatgacggccgcttcatctacggatacgcctatgccgcagataccggtaccgccatgcagaccggacacgcctttgtcgacctgtactacgagacctacgatgaatcggtcaaaaatgcggtcatctcggtaaacgtatacgtgatcgacgacgaggtcgccgctctttatgaagaggaaaacaaccagatcatgaaagactccctggcaagccgcggagtcgtcattgattgacccgagtttccttatccccagtccatacaaacggcaagccgccagtcaggacgcaacgtcccgccgcggcttgccgttttttttgctgccccggctttttcgactttccttccaggcgaagtcagaccatgtgccccggattcgtcttgacgctgctgacacaaaccgatataataagaaagtgtcattcgtactttgagtacggttcttctgccggtcttgctgccatgggaaaccaccattcccgacaggctgaacgaacagtgaccgattatcatcaaaaataccgtatccgggtgtagcgcagttggtagcgcgcctgctttgggagcaggatgccgcaggttcgaatcctgtcactcggaccaaaaaaaactctcagctcaggctgagagtttttttgctgaaaaaatctttatcaaacaggcgcatacaagagcaggccgcagcattcagctgcggcctgctctgttttaattttccttgtctgatctctcatttccgcaccggcctgatatatttccagaaccgtttgcaatcgtggtagaaatagaagatcctacccggagtggtatccagccggtatcccgttgcagaatagtcaaaggccttcatggctttttcgattttttcctccacggcgccgttctccgtttcatagtcaaagggaccgtgttcaaaaacaatatagtccccttcgggaatgtccatcagcagcatctggggcgggacttcgccatcgtaatcaaggggcagccgcacaccgtagcattcggcaagaggtatcccccagctgcagattctgccggtgggatcattgagaaaggccatgatctgcccgctgccgctgtttgcttcgtttccacccaggtcgtccagttttcccggtatgctgtccagcaggccgcagatggtttcgcagtcctgaccgggaatttggctctgtttttgccagaaatcccaatacccgatactttcgtaatttctgatatgcaaaaacttatgcgccgggatggtgacaaaataggtcttgatctcccctgccgttttttccataccggtgcctccgttttccaaaagatagcagtcaaagggtttaatgatcgtgcgcagcgccaccgggaccggatcgcgccggtactcgcggggcgtcattccgtatgcctccttgaacgcgcgggtaaaggcttcgtgggaggaaaacccgtaatccagcgcgatctctaaaataggagtcggggtatcccgcagctgtttcagggcaaaggccagcttccgataccggagataatcgcggaactgcatccccgaaatctctttgaactttctggaaaaatgggattgcgagtatccgaattcctgtgcaagaatacacagggtcaggctctcgtcgtttttgctggcaatacaggcgtcgattttctctatgatcttctgaacattcttgcaccattcatgatccatttttatttcctccccatggttctaagtccattatacgcaaattgccgtaatttggcttgattttatttgcggctttggtgtcgtctcttcccgaaggaaaagacattgacagtgtaccaaccaaaggataggataagggtattcagaccggcagtcaggagggtccggtatgttttcaaaaagaagcggcaaatccgctccaaaatcctgacgccgcgtcataattctgagacaaacatgacaggcagttgtccaaccgtcatgctataatacagacaaaaccggaaaggcggtgcatctctcgtgaaagtggagcggctcatcggtatcctgtccatcctgctccagcgggagaaagttacagcccccgaacttgcaaaacagtttgaagtatcccgccgaaccatccagcgggacatcgactccctttgcaaggcgggcattcccatcatcaccacccaaggtgcgggaggaggcatttccattctggaagggtaccgcgtggaccgtacggtgctcaccgccccggagatgcaagccatcctgtccgggctgcgcagcctggacagtgtcagcggcacccggcgctacgcacagctgatggaaaagctatccgccgggacagccgatctgctccccggcagcactcatatgctcatcgacctttcttcctggtccaaggccagtctggcgccgaaaatcgaactgctgcaaacagccatcgggcagcaccgaatggttcatttttactactattcccccaaaggagaatccactcgaaccatcgagccctattatctggtttttcactggtcagcctggtatatatggggctggtgccaaacccggaaagatttccgcctgttcaagctcaaccggctgaccgagctgcgtaccggcgacttttttgtcccgaggcctacctccctgcccgatttagctccggagagaattttcccggccaggtatcaggtcaccgtcctttttgaccccgcctgccggtggcgtctggtggaagaatacggcgcggactgctttaccactgctcccgacggcaggctgcgtttcgtccaggaattttccgacgcggacagtgtgcttggttgggtactggcttttggagatcaggctgagctgctggcgccgaaagaactgcgggaaagattgggtgctttgattcagacattggcgcatcgctaccaagggagggattgacatggcgtctcatccggattttgtgaactatgtgactgaacagctccgggaggccggagccatccgcagccgaaagatgttcggtgaatacggcctttactgcgacgatgtctttttcgccgtcatctgcgatgaccagtttttcgtgaagatcactcctcagggggaagccgcctttccgaacctgcccaaagccccgccctatgagggggccagggattcttttctggtggaggatgtggaagaccgggaccagatgacggaacttacgcgcatcacctgccaagccctgagaagcaaatcgcaaaagaaacggaggaaatgaccatgccgtttgattacaagaaagaatacaaggaattctacctgccgcccaaaacgcccggcctcgtcaatgtacccgccatgaattttctggccgtgcgcggccagggcgaccccaacgaggaggacggcgcctacaaaaaggccattggcctgttgtacgccgtggcctacaccatcaaaatgagcaaactgggcaagcaccagccggagggctactttgactatgtggtgcctcccctggaaggtctgtggtggcaggaaggggttcatggtgtggactatacccgcaaggcggattttcattggatctctctcatccgtttgccggagttcgtgacccgcgaagtctttgaatgggccatccaggaggccacggaaaagaaagggctggacgtttccccggtggagtttttcacctgggaagaggggctctgcgtccagtgtatgcacatcggtccctatgacgaggagcccgccaccgtggctgccatgacagagtacgcccaaacccagggctatacccaagattttggggagcatcgcttccatcacgaaatttatttgagcgatgtgcgccggtgcaaaccggaacggctgaaaacagtgatccgccacccggtgcgaaaggtggagcaggtatgaaaggcttttcccgtgaagaacttcggttttccctgtgcgggctaaactgtgccctgtgttccatgcatctgggcggatactgccccggatgcggcggcggtcccggcaaccagagctgcgccattgcaaaatgttctctggaacacggcggcatttccttttgccccgactgtcccgagtatccctgcgcccgttacgatggatttgacgatgcagactcctttgtccctcaccggaaccggcagcaggacatcgctctggcccgggagctggggttggatgcctatcttgccctgctggaagaaaagcgctcgattctggacaagctgctggcggaatacaacgacggccgccgcaagacgctgttcaacacagcggtctatctgctgccgctggaggacctgcgtgccgcaatgacggcgctgtctgcccaaccggagttggcggagcaaacgcccaaggagcgcgcccttgccgctgtgggtctgcttcaggatgcagcagaccgccgggccatcagcctgaaactgaaccggaatccgaaaaagggatgaggctgtggcaacttccggggtgactgcccattttatctgcacaaacgtatctcaatgaggaatgaaatcatggaaatcagactggcacaggcacaggatatccacggttggatggctctggtggaacaggtaaaagacagctttcccgggctggagacagccgcggccctggcagagcatcgagaaaccgtcctccgctttatcagggattcgtctgccatctgcgcggcggaaaacggccgggtggtcggtacgcttttgttttcccgcgaaagcagcatgctgtgttttttggcagtcgacccgtcgtgcagaaggcagcatatcgcccggcaaatggtgacctttatgctgacacagatggaggacgggaaagccatcaccgtgaccacctaccgtgcagacgacccccgcggagcagctgcacgagcattttataagcacatgggcttttccgaaggccacctgaccgaggaattcggctgtcccgtacaggagtttttcttaaagcgataagcctccggacaaacatgagcacggaaaatcgggcaaggccggtttctttccggtatgctggacccagaaggacggtgtgaccaatggattgggtaacaggcattcatcaggcgatccggtatatcgagcagcatctccgggaggagctgactatccggcagatcgcgcagcaggcggccctgtcccctttttactttcaaaaaggctttgccatgctgtgcggtatgacggtgggcgactacatccgccagcgccggctttccgccgccgggctggaggtcctcacgacggaccggaagatcatcgacatcgcgctggaattcggctacgactcgccggacagcttcaccaaagcctttacccggttccatggcctcacacctgccgcactgcgaaaaagcggaggcgcggtccgttcctttgctccgcttcggatcaaagtgacattggaaggtggtcaaaacatggattgcaaaatcatgaaaaaagaggcattcacggtgctctgccgggcaaagacctttaagtatgaggaggctgctgcggcggtcccccgtttctgggccgagcattttgccgcaggcggcggcaaggtcgtgtgcggcatgtacggcatcaatctggacgagagcatgggcggcaatgagtttgaatacctcatcgccgacaactacgacccgtccaaggatgtccccgacggctttaccacccgcaccatcccggcccacacctgggcggtgttcccctgtaccggccggatgccccaggcgctgcagggactgaaccagcagatcttctcccagtggctgcccacgaaccccgactacaagatcgccgccggcatcaacgtggaactgtacagcgacgccagcaagtttgaacagggcacccaggatcaggactactactgcgagatctggattccggtggaaaagaagtaacacacatatgcgtcaggccccccgcttctcccgcggaaagcctgacgcatttcttgattgggaaaccacggcagcatcctccctgccgtaccgccaaacgggccgccttttctttgccacggccagggttttgccctgcccgaccggggcttgttccttcccttgcaaccatgtataatgcaagaagataaggagaagcgagtatgattcgagacatctgcaaagacgtgatttttctagcccagaaagcccagcccgccctgccggaggatcgctccgtcgccgccgacctgctggagacgctggagcaccacaaggacggctgcgtaggcatggccgccaacatgatcggcgtgaacaagcgcatcattgcctttgacaacgagggcagctatatggtcatgtacaacccggagattttgaagaaatccggtccttacgacaccgaggaaggctgcctttccctgaccggcgtgcgcccggtcaagcggtggaagtccatcaaagtgcgctggcagaacgaagatttccagccgcgcatcaagacctttaccggctggaccgcccagatcatccagcatgagatcgaccactgcgaggggatcatcatatgaaaaagtgcaggatcaccgtcatgcgcatcacccggtatgaggacctgatggcccggtatgaaaaccccatctcccacgcctgcgacatggcggaagggcaggttttcattgcaaacggctggcagaaaccggagggcttctgccagagcgcctgggacaccctctccccttttgttctggctctgagccacggcggggagaacttctacgacggctggatgaaaaatccccgctccgccatgctgtcctgcaatgacgggttccgtccggtgagctttctggtggaagccctggacgaggatgccgagtaaggaggccgcaccatgtttgaaaacaaagttgccgtcgtcaccggcggagccaaagggatcggcaaagccattgccgaagaattccggaaagcaggcgccaaagtctgcgtcattgaccttttgcccaacgattactacgtgggcgacctggccgaccaggcggttttggaggattttgcccgcaaggtcatcgccgagcacgggcaggtggactacctcatcaacaacgccctgcctttgatgaagggcatcgaccagtgcagctatgaggagttcaactacgctctgcgtgtgggcgtcaccgcgcctttttaccttaccaaactgtttgcgccccactttgatcccggtgcggccattgtgaacatttcctcctcccgggaccgcatgagccagccccagaccgaaagctacaccgcggccaaaggcggcatctccgctctgacccatgcactggcggtgagtctggcggggaaagtgcgggtgaactccatctctccggggtggatcgacaccgattacaccgtctaccacgggccggacgctgtccagcagcccgccgggcgggtgggcaacccgctggacatcgccaacatggtgctctacctctgttcggacaaggcgggttttatcaccggggagaacatctgcattgacggcggcatgacccgccagatgatctaccacaacgattttggctggaccctgcaaggagggaacgatctgtgaaaactgccatctgctactactcccgtcaccacgggaacactctgaaagtcctggaagccatggcccgggagggcgaggtcgatctcatcgacgtcaccacccgccaggccgtccgcctggaaggctacgactgtatcggctttgcttccggcatctatgcgttccacttccagaaatccgtcgtcgagtttgcccggcagtatctgcccaagggcaaaccggtcttttttgtgtacacctgcggcggcgcaaaaggcagcggcgcggcggagctggcggaaattgccggagaaaagggctgcccggtgttgggtgagttcgggtgcagagggtacgataccttcggccccttcaagctggtgggcggcattgccaaaggccaccccgacgccgccgacctggaaaatgcccgccggttttaccgctccatcaccgaaaaatgcgcccgggagatgcagaaatgaggatcgccattctctccgacacccacggtctgctgcggcctgaggtggtggaatatctgaaaaccgccgacatcattctccacagcggagacatcaacaaacagagcatcgtggacgaactgcggcagtacgcgccgctgtacattgtccgcggcaacaatgacaaggagtgggcgcaggacatcccccacaacctcaccctcacgctggacggcatgacctttgtcatggtccacaacaaaaaagaagtccccgacctgaccggcgcggacgtggtggtgttcggacactcccacaaatatttgcaggaggaaaagggcggcgttctctggctcaatcccggctcctgcggtccccggcgtttccatcaggagatcaccatgatgatggccgaactcaccggcggcagtctccgggtggaaaagatcaccatcccccacgaggtgccgtgatggagcttggcctgacgtttcccctccagcgctttttgaaacagaaaccgccggcctacggcatcgagccggaccggcggttttgctgggatctgcatatcattgacctgcgggggcggcactgcctgctggccgtccactgccacagccgctacacctttgtgcggtatgatgtatcgccttttcagtgggcggatattcccggactgttccggaaagggctgaccgacagcctgaccgccgccgggtttgcccccgatgctgttcaggagtatctggggcaggccggggaagttcaaatcacccgcacccacggccgccgggaagtggcgttcctcaaccgggcctgggaggatgtactggccttggacctgtgtctggacacttccagtccggcccagcccctgctggaccacgccgtcaatacccgtcccgcccggtgcgtgggctttgcgggcctggggacgggactggaacggatggccgccacgcttagagaaagaaaggcatccaaatgaaaatcgagccatttgaaattgacggcatccctgccattttgtacggggaaccatccaagctgggttacctgtttctccacggacagatgggctgcaaagaagaggcggaagcctttgctcgtgtagtctgccccaaaggaatacaggtactttccatcgatctgcccggtcacggagtccgccgggaccggggcgaggaactggccccctggacagcagtcccggatattcgagcggcccgggcctgggcagaggcacactggacggcggtatccgtccgggcaaacagcatcggcgcttactttgccatgcttgccatcgacgcgccggaccgcgctttgctggtctcccctattctggacatggagagattgatcctgaccatgatgggctgggccggagtaacggaagaacagctgcaacgtcagggggaaatccccaccgatttcgggcagacactgtcctggaactatctgtgctgggtgcgggagcatccggtcaatgactggaaatgtcctgttcgcatcctttatggaagcatggataccatgacgccccgcacggtcgtggaagaatacgctgagaaacaaaacgtcaggcttaccgtgatgaatggcggggaacactggttccatacccctgaacagcttgccgtactgcaaaaatgggaggagactgaactttgaacaccgcagaaaacccgatctgtaaaacgccgcaggaatccctgccccggaataagaccagagaatgtgccatctgccataaaaggcccaaggtcgcttttctctgcgtgcacaactcctgccgcagccagatggcggaagccctgggcaaaaagctggccggcgatgtatttgagagttattccgccggtaccgaaccgggcgggaagatcaatcccgatgccgtgcgcctgatgaagcaggtccacggtatcgatatggagcagacccagcacagcaaatctctggcggatctgccgccggtggacattgtggtcaccatgggctgcaatgtccagtgtcccgctctgccctgctcccaccgggaggactggggtctggatgaccccagcggcaaaccggacggggagttcctttccgtcatggagaagatcgagcaaaaggtgcttgatctgaagcaacggatccagaacgggaccctgggtcctttctgatcgctttctttacgctttccggtcaagaaggctcaaaaccgtatcgactgccgcttgtaccgatgccacgtcggcctcgccgtcggaaaagaccgcctgcaccggcatgcgcagcagataatcggtagctgcggggtcctgggaaagctccatgggcatggggcagtccctcagccgggatgcccagcggcattgtgcgccccgattgacgccggacagccacagttccagacaaaacgttttatggacaaaagccaccaccagtttcaggcctttttctctcagttccgggctggtaaaggaaaaatatgcgtagtccatggcgttttcggtgatgctgttctggaaccgaaaagccggcatctgccgttccagttcactgcgcagataccggaaccactgcacaaattccccgtagccctgctgtaagtccgtcgtccgcaaaagcgtatggtatcgctccaaaagttcgctgtcaaacttcatgtttgtcactcctgtcccggcagcgcgccctgctgcaaatggctccggcgctcccggagcagtgctttcattatagcacggttgctcaaaaagggttgatgcaaggtttcgcagcgtcgtccgggattcatctccgtttgcggaaatcttcctcaatggcgtccttccagtgcttgtccagcggggcgctgcaccggacggcggcaacggcctggctcactacctgataattgaggcgggtgccggcactgtcgcagtgatagttcaccgcccggtcagaatcaataccaaggctccccgccgtctccaccgcgtcgatgtttgcgcccaggaacaggaactcccagccgtatttttctttttggcggcagatcatttcccggatctgcggggcggaatagcggcggctggcgttctccatgccgtcggtggtgatgacaaaaagcgtgtgctcgggacggtcctcggggcgggcatacttatggatgttgccgatatgacggatggcaccacccacggcgtccagcagggcagtacagccccggacatagtactcccgctcggtgatggggcggacctgttccagccggacccggtcatggaggacctgggtgcggtcatcgaaaaggatggtggagacaaaggcctcgccgggctgctccttttgtttgtggatcatggagttgaacccgccgatggtgtctttctccagcccttccatggacccgctgcggtccagaatgaataccagttcagtcaaattgcgtttcataaaaaatccctctgttctgtgttgtgtggtttacaagcacagtatagggggattttttatgttattggtcgcccggcaggcgacataaatcaacaggacagcacaggccattccaagtctgcgccaccgaatggtacaccgcttccatcgcagcctgatgttcagcatgtacaaacatgaaatagtatcggtttgtatatcgaggatattccagcaacagggtcttatctgcccgcaaaaaagcggtctggaacgcaaggatttttcggatacagggttcccttttcatcatttgcgggcgatgctgatataaaaccacactttgtccccggtcataataatcctttacttcctgccaggtagtatgcttatcctttgccgaaccacgctgatgcattttctccgtttccagtccattgtccgggtcaagaaacacaacatccgcaccaactgttttcaaaagcgcctgttcatgccacgcctttcgtcttgtccctgtcagcgggatgccgaaaaactgcgctacaaaaattccgcttttctccaccgcttccacagatcgatcgcgtttcacaagatcggccaggcagtcaaacaattccggatcgtaatgcctgtattcttccggcttggcaagatacgaaatatattttccatcatcctgcttcctgggagctttaggcacaacacgataccagttgactgccagccgtagtccctctgtcgtcatagcccgcagaagcccgtactttccataatctccgatatcgcccacataattatcctgcatggcggtttcctttacttcctcaaaatcttttccacaggtttgcccttggccagctcatccaccagcttatccaggcagcggatgtcacgcatgagaggttcctcgatctcctccacacggatgccgcatatcttgccggtaatgagagcacggtcagggttcatggcaggggcgttgcggaaaaagtcgccgtagctggtctcggactgttccagccgggcaaggtccgccggggtatagccggtgagccaggcggtcacctggtccacctcctgccgggtgcggcctttcttttccgccttggcaaccagcagggcatacagtttggcaaagggcatctgtgtcacatcggcacggggcatagtgtcaacctcccagcaggctctggtcaaaggcaaacagagcctcattgatctcaaaaatgttgtagttctgatgggcaatgaaatattccacaataatgtcgaatttgcttgcgtgagaaaaggcaaagcctgccttttccagcagttcacgggcctccgccagcggcagttcaagggcgatggcaaaggccatggcggtgggcttggagggtttataatgcacatccgaccggatcttggagaagagtttgcggtcgatgttggcctttttgtagcactgtgcatcggtcatgccgcgctcgtcgatcttgcgcagcagcatctgggaaaagctctcgtctaggcggtccaatgcttcgttcaggtccgccggggccgctgccgcggcggccaaaggctgcgatggatactgggcaggggcgcagggggcaaacatggcccggtagcgccgttcctccccgctgtcgctgtgttccgccgcataatggtcgtcgatgtaggcggcaatatcggcaaagagcttgcctccgatggtataggtctcccggtcaaaaatgaccaggtagaccgtcatgtcatgggccagcagaaagtccccgatggtatccaccgccaccttcagcgcctggtccttgggatagccgtacactcccgaagaaatgagggggaacgccaccgtcccgcacccgtgggccaacgccagctccagggaggaacggtaggcggaaaccagcaaatcccgctccccatggttcccgccccgccagaccgggccgacggtgtggatcacataccgggcaggcaggcggtaaccttttgtgattttggcctgtccagtccggcagccgcccagcgtgcggcattcccgcagcaggtccggtcccgcggcacggtggatggcgccgtccacgcccccgccgcccagcaggctctcattagcggcgttgacgatggcatccaccttcatggcggtgatgtcgtttcgcacgatatgcaggggcataaggccacctccctggctttgttcaaatctccacgcggtactccccgtcgatcagaaggtactcgacgccgtacttttggcagacttcccatgtctgggcgttatcccggagcaacgtttccagcgtacagtccgagtcgtcttgcctgtgttccaccacgccggcatgcctcttgatgtcgtcatagtggctgcggatataggcctcgctcatcacaaggcagcggtagcggatctgctcccggtattcgggggaaaaatccttctcccagtcaaaagggatgtagcagccctccacgatcagattctggccgttttccacagcggtcttgaccatttcccgcaccaccggccacaggtaatcggtcagttcccagtcgctgctcatgggcgtgagggatgtgtatccgctgcggatcaatcccattttcagatggtccatggacagatacgggtatccgtaccgttccagcatcctttgggccagggcggtcttcccagtatgggacgcccccgcaatgagaaacaccattttgaatcctccctgcagcagagctgttttgcagcgttttacagccttatcatagcacgcacggccccgcctgacaatcgggccggagccgcaaacgggaaatgactttttacgttaccggaaaaatcaaaaaaagcgccaaacggtcttattttgtccttgcacaccggcacagaatacggtacaataaaaaagttcgggtcttttgggtacgtccgcaccgcggcgccgggcccggcaccccgtttgcaaaactctgcgacagaaaggaaagcatagttttatgaatgctgtactgaatattctgcgcggtatcgtcatcggtatcgccaacgtcatccccggcgtgtcgggcggcaccatggcggtatccatgggcatctacgacaagctcatcagttccgtcaccggcctgttcaagcatttcaagcagagcatgaagctgctcattcctctgggcatcggcatgatcatcggcatcgtgggcttcggtttcctgctggaatacctgctggccaaccacgttctcgccacctgcctgacctttgtgggtctgatcctgggcggcctgcccattctgtggctgagcctgaaaagcaacctgaaaaagacccccggccgccgcatcggtgcgggcgaggtcatcagcttcctggtgctgctggccatcggcatcggcctgcccctgctgcagggttccgagggcgccatcaagaccctgtccgttgatgtcggcaccatcatcatcctgttcctgctgggtctgatcgccagcgccaccatggtcatccccggcgtgtccggcagtatggtcctgatggtcctgggctattacagcaccatcctttcgctggtcaccggcacggtcaccatgctcaaagacatggacttcggcggcgtcatccacaactgcctgctgcttgctccctttgccgtcggcgtggtgctgggtatcttcctgattgccaagatcatcgagtacctgttccaacgcttcccctgccagacctatgcggccatcatcggcctgatcgtctcctcccccttcgccatcctgtactcggcggacgccctcagcggcttctcggtccccgagctcatcatcggcctggttttggccgccctgggcgcctgggtcacctggctgatgggcagcaaagaggaaggctgacaccttttccatccgcacaaaataaagaagcagccccgcggcgggctgcttctttttgttttgcgtcaccggcaccggtgttttctttctcctgccggcccgcggctccgccggaaaagcgtctttcccggcagaccgggatatgttataatgcaggcaaaccaacgcattttccaaaaaagagggttcccctatgcagtttgaaagtatctggccagattggaaggccgcccctttgacggaggaagatatccccttcatctaccgtctttgtacaagcaatccccagtattaccggtattgtccccctgcgcccacggccgagggcatccgggaagatttgaccgccctgccgccgggcgtggccccttcctgcaagtactttatcggtctgcggcaggacggcgttttggctgccgtgctggatctgatcctggggtatccccgccccgacaccgcctacatcggcctgttcatgatggatgccgcttttcagggtcagggcgcgggctcccgcattgtctccgccctttttgcggcgctggaacaggagggctttgccagggcacggctggcctatatgcagggcaaccggcagagcgagcatttctggcgcaaaaacggctttgtccccaccggtgaaattgctcaaaccgaccacggcacggccgtgctgatggagcggatgcttactcccaacagataaggaggaacctttgatgaatcaggccgcagaggaagtccgtgccaggctgtttgccttgcaggacaaggaatatcaggcgttcaacgcaaaattgctgcccaccatcccgccggagaggatcatcggggtgcggatgcccctgctgcgcaagctggccgcagaataccgcggcacagacaccgcggcggcttttctggcggaactgccccacacctactgtgaagaaaacaacctgcacgggctgctgatctgcacgctgcgggattatgacgagacggtggccgctctggaacggtttctgccccacgtggacaactgggccacctgcgacctgctgagtcccaaggccttcgccaaacaccccgacgccctgcccgggcagatccgcctttggctggacagcgggcgcacttacaccgtgcgttttgccctggggatgctgatgcagttttatctggacgagcagtttaccccccaatggctggactgggccgcgggcgtgcaaagtgaggaatactacgtcaacatgatgatcgcctggtattttgccaccgccctggccaagcagccccaggcgacgctgccggtcttggagcagaaccggctgtccccctgggtgcacaacaagaccatccagaaagccatcgaaagctaccgcatcactccggagaagaaagcctatctgcgcaccctgcgccgcaaggccgttccccgcggggagtaagcctgcctgcaacacaaaaatcaaacagccgcggaagtcggggaaaatttcccgccttccgcggctgtttatctgttttggtgatttggttatccctgcgcccgcagagcatcgatcatatccatgaccgccagggtccggcggcgggcctgagcctcggcggcacggtccttctgggcaaggatgcgggcaaactcggcgaactcataggccatgcggtggcgttcggtgcggggagcatcggtgcggatgccgccgccccggttggagccaatcacgctgtaaacctcttccaaggcgttggtgccgccgtgcagaaccagccggccctcggtgccctggatcacgcagccgcactccccgtccgagtccttggaagccaggcaggccgccgcgaactcggggtactgcaataccgccattcccgccgtgtcgatgccgtcccggccccgggtgggataataggtgcagtgctccgggctgcccagcagcccccacaggtaatggaggttgtagacgttcatgtcatacagcgcaccgcccgcgcaggcggggtcaaaggtggtgttccagatgccctggaggtagtcgtcataccggcggctgcgggcgcagaaactggccgtcacgccgcgcaccgggccgattttgggcagttcctcctgcaaaaagcggtaggcgggcaggtagggcgtggtgatggcttccagcagaaagacctgcttttcgtccgcaagggcaaacagttcccgggtctcggcggcggtgggggtgaagggcttttccagaatgaccgagtaccctgccgacagcacccgttttgccgcggcgtagtgcagatggttggcggtaccgatgtagaccgcgtcaaagccccctgcctggagcagttcctcctcgtcggtatacactgcagggatgccgtactgctgcgcccactgctccgccttgggacggctctgggggcggcagcacagggcgctgatctccagctcgggcatgtcgcccaggttctgcaagaattccgccacaatgcggctggtggaaagcactgccagtttcatatcggttgctcctttctgcttggggatgtttcccggtcaaatcacaccgtaatgttccagtgcacggcggacaccgtcgtcgtccacatcggcggtcacataatcggcggccagcttcacgtcgtcggaggcgttgcccatggccacgcccaccccggcatagcgcagcatatcaatgtcattgccgccgtcgccgaaggccatggattcctcctgacagatgccccagcgttccagggtcttttgcaggcccaccggcttgccgccgtccgcggggacgatatcggtaaaataggggttccaccgcgccgccttgcagccgggcagatgggagaggaagccttcctcctcttccttgggcaaaaacacgctgagctgataggtggtgtgggtcagcgagcgcgtcgggtcgccggtgggttccatctgggcggtgccgcccagcatctcatacagatcggtaacgggcttggtgatgcggttgatgtacacgtagtccagctccacaaagctgcagctgatgtccgtctgctccagatagggcagcagcatccgcagggagtcggtgggaatatgctccttgtggtaaacgccctgggcgtcatagcaatactggccgttcatgaccacatagccgtcaaattcaaaatccaccaggtctttcagaaaatgcatctgcactggcgggcggccgctggcgataaagaccttgacgccgcgctcccgcatacgggtcagcgcctgtttggtggaatcggggatacggtgagtcttgaagctgaccagcgtaccgtcgatgtcaaaaaacaccgccttaatcattctcaaaccttcccttccccggcagagttccagccggatttactcctgtttcaggttgcggcccatgagggaagccaccgcatcccgcgcggccagcttgcccgacagaatggcatccaccacatcgatgatgggcagttccaccttgtatttcttttccagacgcttggctgcgggcagggcgttgatgccctcgaccacctgaccgacctctttcttggcgtcctcggcggacatgccgtgaccgatgagcatgccggcgtgcaggttgcggctgtgcatactggtgcaggtgacgatcaggtcgcccatgccggacaggcccgcaaaggtctcggcacggcagcccatggccatgcccagacggctgagctcggcgttgccgcgggtgatgagggcggccttggcgttgtcgccgtagcccaggcccatggcaatgcccaccgacagggcaatgacgtttttgatggcgccgcccagctcggtgcccaggcggtcggtgttggtgtagacgcggaagttctggttgttgaagatcttctgcaccgtcttggcgtcctcttccttcgaggatgccgccacgatcagggtgggcaggtcacgggccacttcctcggcgtgggtgggaccggacagagccaccacacggcaggtcttgcccttccctgcgctgcgcagttcgtcctcgatgacctcggacatggtcatgagggtcttttcctccatgcccttggcaacgtccacgatcagctggccgtccggaatgtagggcgccgcctttttggcggtagaacgcacaaagacggagggcaccgcaaacagcagcaggtccttgtccacgcacagctccgccaggtcggcggtgtagtgcatggattcgggcagttccatgccgggcaggttggggtgacggcgcgtggtacgcagatttttcagttcctcaggcagggcgctccacacggtgacgtccttgccgttgaccgccagcatacgtgccagcgcaatgccccaggttcctgcacccaatactcccactttagtcatagtctgtttcctccaagcgaccgggcgttttgcgcgtccggatgattgtactgatattatttgtgccccagaaaccgctcccagaatgtgggtcggatcacggtgcggggttccacatccacctcaaaccgctcgtaggcgttgatgatgcgggtggaaccatactggtgctcccgcgggatgttggcgccgtaattcagatggatatgcccgtgcagcatcagctggggcttgtaggcgtccagcaattcatggaacacggtaaacccgcggtggggcaggtcgctgaaatccccgtagccgtgcatgggagcatgggtgactaccacatccaccccgcccatgcggtcgatccgtccgcgcaggcggcggatgcgggcgcgcatctcggcctcggtatactgccaggctcccgcccggtaacggcagctgccgcccaggcctacaaagcgcacgtccttgtatacaaacacgtcatcgtcgatgcagatagccccgcccggcggattctggtcatagctctcgtcatggttgccgtgcacatagattaccggcagcggcgccatggtggccagaaagctcacgtaatgggcgctcaggtcgccgcagcagacgatcatatccacgcccgccagcttttccggcttgtagtagtcccacagggatttgcattcctcgtccgcgactgcaaggatcctcatacttcgcggacctcctccggcagggcggcgcgatggatgccctggacccggtacatgggtttggattcctcggtcagttcgtcgtaggacgggatgcggccctccacggcgtcacacagccagtccatgtgcaggatctgttcgggggtgaatccgtgcagaccctcgtttttcaggctgccgtcctgggccacgatatggcaggcaaaggggtccacattgcccgagatgatgcccgcacgcaacaaagaggccagatggcgcacatcgtggggcagttcccggctgagcagcacgtcaatgacgccgctgttcatgccccaccaatagttgacgatacggccgtccgtaccggatttgtcacggttccagctgccgtccagcacgctgcggacgacatgctcgtaaaactgaccccagtgccagaacggggacgccaggtcctgcaggacaccgcccggacggatctggaaaatgccgaattccctgctgggacggccgggcgccggggtgtcgcggccggacaccaccgtgatgccccgggccgcaaagtttttgagggggtcccccggcaggcaggtccactgcaggtcgatcttgacccgagggttgaccatgcgggcgcctagggcaaaggcgttgatgttggcaggcacgcccaacatgggatagttggccacaaatccgacgcggtcattggctgccatggcaccggcaatggcgccggtgatgaacttagcctcatagatgcggctgtaataggtgcggatgctggcatagggcaggtccatggagcagttgaggatgcggacctccgggtgacgcactgccgcccgaaggctggcccccgccagctgcggggtagtggtgaacacgatgttggcgccttccgcaatggcctgttccaccaactcttcgtcatttttgccggggaccgcgccgttgtaggccaccgtctccaccttgccctcaaacacctggtccagctgggtacggccgaattcatgggagttggtccaggtgctggtggacggggtgcgctcgttgacgaacgccaccttgagatggctgggcggggccgtgcggatgccgggcaggatacgggccagcagaggtgtctcctccggcacggcgggctgggtactgagtttgatggggtcggggcgctccagggccagaatatcatcccacacggcgtccaggcacttggcgatctcggtgggcgatttgtccagcatttcccggtagccgtacacccgcaccaacatcaccagggcatccccggcggtgaggcgcatccggtcgccgccccgggcctgataggcttttcggacccagttatacagggaacgcacgtcggtacgatcatcatcggtccatttttcgccgggctttttgcccatggcggtctgcaggcgggcataaccgccctcctgcgtgagcatcaggtaatagatccggctgagatcataaaagtccatgaactcatagtagctgcggatctgggggcggtcggcatactgcggcaccatgcggatcacgttggcgggaatgctgtccgcatcaaagtatttgagcacgctgacccgcttgttgccttcctggacgtaaaaacggcccagatattcatagcagcggatggggtcgcggatgccctcttccagatgggcgtcgcacaggttgatccacttgcttgcgaattcggtatcgatgtccaaaagcggcataaaattgcaggcaaaggccgcagtccgccccgccgttttggtgccgacgacctggtccagagggacctcgatcaggcccaggggaagctgggattccacgtcggcgttttccagaatgtcgtccaaaaccggcaggtagggataccgccccgccgccatggcctcacggtattcccgctgaccacgtttttgtgcacgggtatactcctccatcacatctttccggttcatcaataccgcccccttgtcaaaaaacagacgatgctaagaaaaggacccccgcgagaggacgcggaggtctttttggcgatttacttgccgaccttttccttcagacggccgctcgccttgaagccggggatcgcagtgggctccagctggctggcgactttggtcttgggattggtgaagctcttggtacggcgctggcgcatctcaaagcggccgaagcctgcgatggtgaccttctcgccctgtttcagggtctcaccgatggtatcaaaaataccgtccataatggtctcgacctcggcggccgaaataccggtggttcctgcaactttcgtaatcaactgagatcttgtcatataatttccttgctccctaatccatctatgatcctgcgcttcgcgcagacaggccgccggccggtcccattgctgggacgggcggcggcactgcgaattaacgtaatcaattatagaaaaataaacccatgtaggcaagcgtttttttgaaaaaacaaaggcgcttgccaaaaaatcgtcatttccgataaaaaccgggcttgctggagcagggatttctgtatattgtctgccgcagttacgattttttgcgatgcagcgtactgatatcgatcaattcgatccggctgacatcgtgatcgccgcgcagggcatccaccagaacacgggcggtatccagggccgtgatgcaggggatggacagctcggtggccttgcggcggaacttgaccgaatcccggtgcgggtcgcggccgtgggggctggtggagatgatatagtccaccagaccgctctccagcaggtcgatgacgttggggcgctcgccgctcatctggcggacaacgctgcaggggatcatctggctgttgagatagcgggccgtctcggcggtgccgtagatcttgtagccgtagtcatgcagcttccaggccagctcggcagcctcgggcttgtcgctgtccttgaccgagatgatgacgcaggaaccggggccggggaccttgaactggtagcccgcgcccaccaggcccttgagcatggcctcgtggaaggtgggggcaatgcccagcacctcgccggtagacttcatctcggggcccagcatggtatccacgccgtgcagtttcaggaagctgtacaccggcaccttgaccgcatagtaagggctcttgccgttctgccacagaccggtgccgtagcccatatccttgagcttttcgcccagggtgcagcgcacggccaggtccaccatgggcacgccggtgaccttgctgatatagggcacggtacggctggaacgggggttgacctcgatgacgtagaccttgccgtcctgtaccgcgtactggacgttgaccaggccgacgaccttcagctcccgggcgaagcggccggtgtaatccaccagggtgtcgatgacgctctgggggaagtcatagggcgggtagacgcagatggagtcaccggaatgcacaccggtgcgctcgacctgctgcatgatgccggggaccagatagtcctcgccgtcgcagatggcgtcaacctcacactcggtgccgtagatgtacttatccatcagcacggggtgggacatatccacgtgggcggtgataacgcccatatactcaatgacgtcggcagagttgtaagccacgatcatgttctggccgcccagcacgtaggaggggcgcatcaggaccgggtagcccacctcgcgggcagcctgcagggcctcgtccagggtgtagacggtgcggccctcgggacggggaatgccgcagcgctccaacagcttgtcaaagcgctcgcggtcctcggcctcgtcgatggcatcggcgggagtgcccaggatgggcaggccgatctcgtccatatgattggccagcttgatggccgtctgaccgccgaactgcaccaggcaggcgtcgggcttttcggtggcgatgacgttatccacgctctcggggttgagaggatcgaagtacagacggtcgccggtgtcaaagtcggtggagacggtctcggggttgttgttgaccaggattgcctcgcagccatgctgtttcagcgtccagaccgcgtggaccgagcagtagtcgaactcgatgccctgaccgatgcggatggggccggagccaaagaccaggaccttcttctttttggggtcgctgtgctcgtcaatgaactgggcggcctcgttgtcggcatcgcaggtagagtagaagtagggcgtcttggcggcaaactcagcagcgcaggtatcgaccatcttgaagccggcacggaaattttccacaggcagcttgtcggcgccggacaggcgcaggatggtcttgtccaggaagccgtacttcttggcttccagatacttttccttggtcagctcgccctgtttgaggccctgttccaggtcggccaggtgctgcatcttgtccaggaaccaccagtcgatcttggtgatgtcgtagatggtctggtgcggcacgccccgcttgagggcttcgtagacgcagaatgcgcgctcggagtcctgcacgtgcaggtgctcgataatatcctcggtggacatttcctcaaaggcgggcagggtcagggtgtccatgcccagctcggtggaggagaccgccttcatcatggcgtgctcgaagttgttgccgatggccatgacttcgccggtggccatcatctgggtgcccagggacttgtccgcgtagacgaacttgtcaaagggccacttgggatatttgacgaccacgtagtccagggccggctcgaagcaggcgcaggtctcgccggtaacgtcgttggtgatctcgtccagggtgtagcccagggcgatcttggtggcaaccttggcgatgggatagccggtagccttggaggccagagccgaggagcgggacacacgggggttgacctcgatgaccgcatactcgaagctgtccggcttgagggcaaactggcagttgcagccgccctcgatgcccagctcggtgatgatgtccagggccgcggtacgcagcatctggtattccttgtcggagagggtctggctgggcgccacgacgatggagtcgccggtatggacgcccacggggtccaggttctccatgttacatacggtgatcacgttgcccttggcgtcgcgcatgacctcgtactcgatctctttccagccggcgatgcacttttccaccaggatctgatggatgggagacaggcgcaggccgttggtggcgatctcatgcagtttttcccggtcctcgcagataccgccgccggtaccgcccatggtgaaggcggggcggacgatgacggggtaaccgatgacgtcggcaaattcgatggcgtcgtccaggtcctccacgaccttggaggggatgatgggctggtgcagcttttccatggtgtccttgaaaagctgacggtcctcggcacggtcgatggtgtcgggacggcaggccagcagacggacgccggaacggtccaggtagccggagcgggccagctccatggagaggttcaggcccatctggccgcccaggttgggcaggatggcatcgggcttttccttctcgatgaccttttcaatgacctcggcggtcaggggctcgatatagacatggtcggcaatgtcgggatcggtcatgatggtagcggggttggagttgaccagcaccgtctcgatgccctcgctcttcagagcgcggcaggcctgggtgccggaatagtcgaactcggccgcctggccgatgatgatggggccggagccaatgaccagaacctttttaatactgggatccttcggcatttcactggtctcctttcgcttgtttcatccgcccgacaaagcggtcgaacaggaattcggtatctttggggccgccgttggcctcgggatggaactgcacggtaaagcagttccatttggtgtagacaacgccctcgcaggtcttgtcgttggcgttgacgtggctgacctcacccacctcggcaggcagggtctcacccatgacggcatagccgtggttctggctggtgatgaaggtgcggccggtctcaaactcggtgaccggctggttggcaccgcggtggccgtacttcagcttgcaggtctttgcgcccgccgccagagcggtgagctgatgacccaggcagatgccgaaagccggaatgccggtgtccagcatctcgccgatgttcttgatgatctccacgttctcggcagggtcgccggggccgttggaaagcatgagaccgtcggcattcagggcagccaggtcggcggcggtggccgtgccgggcaggaccgtcacgcggcagccgcgcttgcacaggcagcgcacgatgttcgccttgcagcccaggtccagcagcgccacatgcaggggctgctccccttccgccacgccggcggtgggctcataggactcaggctccttgcaggtgacggtggcgacagcctgggtcacggcgtagggcttgatctgctccatcagggcagccagcttttcggtgtcggtattggggtcaaactcggtggtgatggcgccgttcatgacaccgctctcccgcagggtgcgggtcaggtggcgggtatcgatgccctcgatgccgatgatgccgttattcttcagaaactcgtccagcgtgatctcgctgcggaagttgctgggggtggtgcaggcttctcgcacaatgtagcccttggcccagatgcggccgctttccttatcttcgctgttcatgccgtagttgccgatcagcggataggtctgggtgatgatctggccgtagtagctggggtcggtcagcgtttcctcaaaacccaccatgccggtggcgaacacgacctcgcccaccgtggtaccggggcagccgatgcttttaccagcaaagaccatcccgtttgccaaaacaagatatgcgttcatgttacctttccttccaaaataccgtgcaatatccggattccctctgtgttggcggcagaccttacagcgtctgcttggcctgttccttcattttgcggctgcccaggtggaccaggggaagcttgccctccttgcagatggggcattcctcgggcaggtagttgggcagatccagcttgagagcgctggccaggattgggaatgggagagggcgcctcggcgcgggtgcggtcgacgacgcagacgatgcccaggcaggtgccgcccgcttcctcgatgacgcgcttggtctccaggctggagatgccggtggtgaccacgtcctcggcgatgatgcacttttcacccggatggatggcaaagcgcttgagggtcatgacattgtccacgcgctcggtgaagatggcgcgcttgcccagctggcggcccagctcgtaggcatagacgatgccgcccatagcaggtcccacgatgacgtccacgtcagtatccttcagctgttccgccacagaggccatgacctcggcgcacttgtcgggatgctgctgcaaaaaggccatctggcagtatgcgccggaatgacggccgctggaaagcaggaagtgaccttccagaaaagcttcgcactctttcagaatttctttgttatctctcgccatttttagttcctccgtaccgctgttccattcttggttttatcttaacacaacccgcatatacttgcaagttattcatgtgttattcaataaatatacgttttatacaccgtttatgcaatcaaacacgggcgcagccgcggatctcgtccagcgtcttgacgccgtgggcgtccatccaggcaccgatctccttggtgatgcgggcgcaggcgccggggtccatgaagttggcagtgccgacctgaaccagagtggcgccggccatgatgaactccagggcgtcggcaccggtcaggatgccgcccaggcccaccacagggatgttcaccgcgcccaccgcctgccagaccatccgcagggcgatggggcgcaccgccgggccggacaggcctgcaaagacgttgtcaaagacagggcggcgcttttccaaatcgatggcgcaggcctggaaggtgttgcacaggctgatggcatccgcaccggcggcttccaccgccttgcacatatcagggatgttctccgcctgggggctgagcttgacgatgaggggcttggtgcagcgggcgcgcaccgcagagacgacgccggaagcatcggcacagcgcacaccgtaggccaggccgccctgcttaacgttagggcagctgatgttcagctcaatgaaatccacatcggtggcggacaggcgctcggcgccctcgcagtattcctccacgctgtggccgcccaggttggcccaggcgctggtgcccagctgcttcatcaccggcagctcgtgctggatgaagtggtccacgccggggttctgcaggccgatggagttcatcaggccggaaggggtctcgtgcaggcgctcgccccggttgccgggctgaccgttcagggtcaggcccttgcccgagatgccgcccagcaggcgcaggtcctcgatagcggcgtattcctcgccgaaaccgaaggtgccggaagccgcgacaacgggtccggccagagttttgcccagaaagtttacacgcaggtcactcacagctcgaacacctccccggcatcaaatacaggcccgtccttgcagacggtcttgggtcccactttggtgtggcaggtgcagcccaggcaggcgcccagaccgcaggccatcttgtgctccaggctggccttgcagggggtgcccgccgccgcgcagagtttggcaacgccgcgcatcatgacggtgggaccgcaggtcagcaccaggtcgtactgtttggggtccagcaggtcggtgaccaggccgtgatggcctgccgcgccgctgtcggtggcaatggcaatgctgttgcaatagggttcaaaggcatccatgccgtagggctcgtcccggaagcccaccatcaggtcgggcttgcatccggcagcggccagctccttgcagagcagcagcaggggcgcggtgccgatgccgccgcccaccacggccacacggcctgcagcggcagccccagccacgtcaaagccgttgccgcagggaccggtgagggtcaaagtctggccccaggccaggcgggccagcttctgggtgccttcccccttgatctggtagaggaaggtcagggtgccctcggcggcatccacatcgtggacgctgatggggcgggacagcaccgggctttcgttggcggcccatgcgcgcagcatatagaactgcccggccttgggcatggggccgtccttgggcagagccaccgtcagacggcggatgtcgggcatgggagcgctctggcgcagcacccggacattacagcttgttgcactcactctggatatcctccctcatacgaacacattcgttgtaggcggcctcgtcaaaggcaacgccgggctgctttttccaggccatcaggatgccgcggctggagttgaccacgccgccgttgcccttgttcatgtacagggcaatgtcgcaggccttgccgccctgagcgccgtagccggggatcaggaagaaggtgttcttgtagcggtcgcggatctcggccgcttcctcaccggtggtgccgccgatgaccagacccacggaagagtagccacgctcgcccatgtagtcggcgcccagcttggtcagagcgtcgcccaccatggtgtagacggtgcggccgtcggacagggtctgatactcaaagtccatgcggccggggttggaggtacggcagaggacaaacacgcccttgccctgatccttgcagtagggcaggtagggaacgatggaatccaggcccatgtagggggccagggtgacgatgtcggcctcgaagtcgccggtgaagtgggccttggcgtacatctcggcagtcttggcgatgtcgccgcgcttgatgtcggcaatgaccggcaggccggaggcacgggccatcttgagggtctgctggtaggccaacatgccgtccatgcccagggactcatagtaggcgatctgcaccttgtagcagccagccacgcccttggtggcgtcgatgaggcggcggttgaaggccacgatgttctcccctgccgtcagagcggtatcggtctcgggcaggtaagaaatctcggtgtccagccccacgcagacggggccgttctttgcaacgctgtcgtacagtttgtccatgttggtcattgttttccagctccttttgttgtcctgtgtgtatccctttgtgtatctcagcccttgaagtcggcgctgcggtaggtttccttgcctgctttcagggtcagcatgaccttgccgtacaggctctggccgtcgtaggggcagttcttgctcttggagtgcagctcgtcggcgtgcacggtaaacatatggtcaatgtccaccagaaccaggtcggcgtcaaagccggggatcagcaggcccttggtggtcaggcccagcacgccggcagggccggcgctcatcagggcgctcaggtgttccaggggcaggccgcattcccggcagagcttggtgtagcagacggcaaaggcggtctccaggcccaccatgcccgcggcgcccttttccttgtcctcgggggtgtggggggcgtggtcggtgccgatgcagctcaccgtgccgttgcggatgccctccaccagagcgtccacgtcgtcagccttgcggatgggcgggttgacccggtactgcaggcggctgtcgtcaaaccacaggtggtggggcgtgacctcacaggtgacccgtgcgccgctgaactgggcctgacggatggtgcggatggcctccttggtggagacgtggcacatatgcaggcgggtgccgtaatactgggccaggtggcagttgcgcaccgtctcgatgttctcggccaggcggtagtcccaggggctgatctcccggtcctcggcgtgggacatgacgatgagcccgcggtcggtggcgatggcaaaagcccttgccatgacggcgttgttcatgacgccgttgccgtcctccgagatgcagcgcaggtcgtcgggcagttccagcaggtgatccagggtcttgccgtcaaagttttgggtgatggagacggtctggttgcagtcgcacaggcccacttccttagccttggccatgacctcgtgagcgatctcggcgctggagcagaccggcttggtgttgggcatcaggttgacgtaggtgtatccgcccgctgcggcagccgcactgccggtggcgatatcctccttgtattcaaagcccggcgtgcgccagtggcagtgggtgtcaatgaaggcgggcatcagggtaaggcccccggcctccaccacctgctccccttccgggacaggcaggtccacgccgaaagcgcggatctttccgtcgctgatccacacgtcgcagcgggtgccgtttacatctttggcatgtttgacgatcatccgtattacctccgttttgcggccgtttgacggcgtttgggcaaaaaaaaacttctccccgaaaggaaaagtcaaaacaagaccccggcgaaaccaaacagcgccgccataccattcttctcaccgctgggatagcggaaacgggaaacacacagcatgtacggcgtcgctcctttcgcttgtttgcacgcggctttcctgccgcggcacagattttatatattctagcatgatgcggcggacgtgtcaacacaaaacgacagcctgtaacaatttcgtttaccccttgcctgcatcctgtttttatgccaaaatgaagtacaagacctattataataggatgtacctgccgagggtacacttttcacagagacagagaaaggcggtgccgctgttttgcgtattttggtcgtagaggacgagccggagctgaaccggctgttgaagaaacgcctggagcaggcccattacagtgtggacgcctgcctgtccggcaccgatgctctggattacctgcggggtgcggaatacgacgccctggtcctggacgtgatgctgcccggcatcagcgggctggaggtgctgcggcggatgcggtcggagcacaacaccaccccggttttgctgctgaccgcccggggcggcatcgaggaccgggtcaccgggctggacgcgggggcggacgattacctggtcaagccctttgcctttgacgagctgctggcccggctgcgggtactgctgcgccgcagcagcggcagcgtcagcgatgtattcacggcggcggacctggtggtggactgttccgcccggacggtgcagcggggcggcgaggccatcgccctgtccgcccgggagttcgacattctggaatacctcatccgcaaccagggagtggttctgtcccgggacaagatctgccgccacatctggaactatgattacgaaggttcctccaacgtggtggacgtctacatccgctatctgcgcaaaaagctggacgacgggcatacgcccaaactgctccacacggtgcgcggggcgggctatgttttgcgggaggaagcatgaaacggttttccatccagctgcgggtcacattgtggttcaccgtcctgatggtggctctggcggctaccggtctggtgttcctgttttacatgggcgggcagtcggccctgtccgccaccaaggaccgcatgaccaacatggccgaagcgtcctggagcgacatccacatccgcagtgacggcgccgaggtggacaacgacctggaatatttccgggacggggtctatctctcggtatacgacgcccaaggcctgccgctgtacggtgcggtcccccgccggttcgacaactcggtggtgtttgccgactccaccctgcgggaggtcaccgactcgggcggcaaatggtatgtctacgacgcctgccagaccatcgacggcatcagcgtctgggtgcgcaccgtggccgccgtggacgaggtggactataccatcacggcgctgctgcggctggcgggcatcgtctttcccttctatatcctgctggctgcggcgggcgggtatctgctgacccgccgggcgcttttgccggtgcggcagatcacccagaccgcccgggagatcggtcagggcaacgacctgtcccggcgcattgccctgggtcccggcaaggacgacgtgcatgtgctggccgatgaattcaaccggatgttcggccgcctggaagcggctttcgatgcagagaagcagtttgtctccgatgcttcccacgaactgcgcactcccacggcggtcatcctctcccagtgcgaggacgccctggaggaaggccgctcccctgccgagacccgcaccgccctgcgcaccatccagaagcaggcggagaaaatggccggcatgctggcccagcttttgatgttggcccgggcggacagcggccgtcagacattgcaccgggaacctttcgacctgagcggtctggcagaagtggtggccgaggaacagcgggagctggcggcggaccggggcatcacggtgacggctgccatccagcccggcatcaccctgtgcggggacgagacgctgctcatgcggatgctgatgaacctgatggaaaacggcatcaaatacggccgtgacaaggggcatctgaccctgaccctggctgccgacgcccggaccgtgaccggctccgtggccgacgacggcatcggcatcgcgccggaaaacctggacaaaatctggcggcggttctggcaggccgatccctcccacagcggcaaaggagccgggctggggctttccatggtcaagtggatcgtggaagcccacggcggcgccatcacggtggaaagcactccgggtcgcggcaccgtctttacctttaccctgcccctctgccccaccgaacccacacagaaaggatgatgttccatgcggcggaaagaccgcgagatcaccgaccggaacgagatgctggacattctgcgccgctgcgatgtctgccggctggccctcaacggcagcgacggcttcccctatcttctgcccctgaattttggcatgagggaggaaaacggcgtgctgcggctgtactttcacggggcggcggcaggcaccaaatatgacctgatcgccaaagacgaccgcgccgcctttgaggcggactgttcccataaaatcatagccggtcccgacgcctgcgactggaccatggaatacgagagcgtcatcgggacgggacggctgcagcacctgacccctgagcaggcccccgaagccctgcccgccctgatggagcactacggcggcagcggcctgcccttcaacgagaactgggtccggcataccgccatcctctgcctgaccgtggagcagatgaccgccaaggcccaccgcgcccccgcttccccggactgaccgtaaaagcacaaaaacacgccccggcaccactggtgtgccggggcgtgtttattttgattcagatgccctttagggccgggatcacagaatgccggagtagcggcaggtgttccagacgctgatgcccataatgacgatcatcaggccaatgaacagcttatccactgcgcggttgtccatccggcggctgaagaagcggccgatcatgccgccgccgatgccgccgcagaccatgagcaccagggtcaggatctcaaagtcggggacgttgcccgccacaatagtggtgaggaggttggtgatctggctgaacaggatgatgtacaggctgttctgggccgcggtcttggtctgcatggagaagaagtaacccaggaccaccaggttgatggggccgccgccgatgcccaggaagctggacatgatgcccagggccaggccgatgaggacgctggggacaaggccctgcacattgagggtacggatatttgctttgcgcagggtgtagatcagagtacccagagtgatgaggaacaggcaggctgcctgcaccgcgccaacagtgttctgattttcaaacaggctgcggaccagggcaaacagctgctgaccgcagacaccgcccaccgcagcgcccaccgcaagataggtgccgctcttcaggtccaccgagctgtccttggccagcatggatttgcccaccgagtagcagctcatggaaaggacggtgcatcccgaaaggaagctgatggtggaaacatcggccagatgggccatgtccagtaccggcttgatgatgacgccgccgccgatgccgcagatggcacccgccaccgaggccagtaaacttacgacgaaaaacagtatctgctgcatttcctcacactcctaatctcccagatttcttaacgctttttatatattagcgcatattcggggattagtccagcgtttcaccgttggtttcgataacttttttgtaccagtagaagctgtccttgcgcaggcggctgtaatcgccggtgccgtcgtcatatttcttgacgtaaatgaagccgtaacgctttgccatctcgccggtggaggcggaaaccaggtcaatgcagccccagggggtgtagcccatcaggtccacgccatccttgacggcctcggccatctgctcgatgtgggcgcgcaggtaatcgatgcggtagctgtcgtggacggtgccgtcctcctccagcacgtccttggcaccaaggccgttttccaccaccatcatgggaatgccgtaacggccgtagatctcgttgagggtatagcgcaggcccttggggtcgatctgccagccccagtcggaggcttccaggtaggggttcttgtagccctcgctcacattgccgtcggtccgggcggcatccttgtgggtggtcacgcagttggacatatagtagctgaaggtgtagaagtccaccgtgccctgtttcagcagttccgcgtcgccgggctccattttgatctcgatgccgtggtcggcaaaatagcgcttggcgtagaaggggtattcgccgcggacctgcacgtcagagcagaaccagttcatcatctgcatctgctgctggcaggccaggatgtccgccgggtcgcaggtaaacggatagctggtgatgaagcagatcatgttgcccatcttgaactggggatagttctcatgggcgtacttgaccgccgcggcgctggccacgaactgatgatgcagggcctggtagcgctcctggggcttgtcgggcaggttggtcatggggccttcataccctttgatggtgccggtggagaccagcgcgccgaagggcatggtgccggcgttgatctcgttgaaggtcagccagtacttgaccttgtccttgtagcgctcaaaaatcgccttgcagtagttcatgaacaggtcgatgagttcccggctctcccagccattgtacttttccaccagggcatagggcagctcatagtggctgatggtgaccagcggctcgatgccgtgctttttgcagcagtcgaacacccggtcatagaaagtcaggcctgcctcgttgggggtgtcctccatgccggtggggaaaatgcgggtccagttgatggaggtgcggaaggtcttgaagcccatctcagcaaagagggcaatgtcctcctcataatgatgatagaagtcgatggcatcatggctggggtagaacttgtccggacggatggaggtggtcacccatttgggctgggtgtggctgccgttggtgcagtggtcgggcacgctctcgcccttgccgtccacattccagccgccttcaaactgattggcagcgcaggcgccgccccacagaaaatcatcgcggaaaacactcatagtcgttacctcctgtgtgatcagggtttgcttttcatacaaaatcggatagttctgcggacggttttgtccgcacaacaggcaaagccgctccccgccgttctcatcagagaacggcggaaagcaagccttgccgaatctatgccggagggttcctccgtggccggtttatttcagtcccaggcgacggaattcttcctccggggcttgtgcctgttccagtgcggcgcacagtttttggttccatgcgtccacacgggaagcatcgctgccgctcagatcctgctgctggccggggtcattgtccaggtcatacagccggtctccgaaggcatatgcccgataaaaggatttcaccggcatccgcaggcagggcaggccgttggtaaagcgtcccccgggtaccagttccgccgcttccatctgctcggcgctgaaatagccgcgcatgttggtgggcatcatggtgtactcgtaaaggggagcgccgggtgcggcgtcggctttcatgtaaacggtgtggccgtcggtgcagcaggtataagagccgtgcacaccaaagagcaccgtgtcgtggatggtcttgccttccagggcgggcagcagtgaggtgccgtccatctcccccatgggctcggcggagcagccgaacaggtccagcagggtgggcgcaatgtccaccgtggcggccagggcatcacagctgccgccctcctgccccggcaggtgcaggaagaaaggcagatgggccagctcgtcatacaggggggagaaattcttgcccaggaagtcgtgctcacccagcaggaacccgtggtcggtgttgacgatcagggcagtgtccttccacatatcatgggcgtccatgaaatccaggagtttgcccaggtgggcgtcgcacatggtcatcaatgcggcgtattcccgtgcggcgttgtccaggtcctgacggcagtccccgctgggtactccgccgtaacggggccagttgagggtctcctcctctggcaggccgtacagttcccgatacttctgcggtacgtagaagggttcatgggggtcaaagcactccacctgcaaaaaccagttgtcgcggtcggcgtgctcggagaggaattccagccccgcggcaaaggtcttggcgcaggacatgtcctcctccgtctgctggcgcaggcggttgcggtagtgctggtcggtggagatgcccgttttgttcagcgggttgcggccggcggggatctccgccttgatgtcgtgagccacgtagcggtcaccctcctggccgcggaaaccctcccaggtgtcgtagcggttatggtaggtggcgccgccgtcctcccagtaatgggagtggtcggtgcacagatgggtgtagatgccgtttgcccgcagtgtctcaaaaaccgagcggtcaaagggctccagcggcccccagctgcggtggaggaaattgtacttgccggtgtgcagttcccgccgggcaggcatgcagggcatactccccgcgtaaaagttgtcaaaccggacgcagtgctgcgtcaggcgttcaaagttcggcatctgcacccaggtacagccgtagttcggcagaaacttgcgggtcagagtgtcaaacatgacctgaatggttctcatgcgatgcagcctcccttgctttgcgggtcaacggcccagcttctttttgacggcagccttggattccttggcatcctgcacttccacgccttccttgtccttgaacaggatcagggtcagcacaaagcccagcaccatggaaacgcccacagcgatgagcgcaccgtagaaggacatatcaaagccgttggggctgatgtacgccgggaaagcgaacaggcccataccgcccatggtgtacagcttaacatccagcaggcccatgatggcaccgcccactgcggagcagccccaggtgatgaacagcggagtcttgaggggcagggtgacaccgtagatggaaggttcgctgacgccgaagaagctggaaatggcggcaggcagagcggtctgcttggtctttttgttgcgggtcttgaggtagacggcaaagacgacggcgcaggtggtaaagggaactgcctgcatgcagcagataacgttttcgaagccgttggtcatgaggttgttgatttggatggggacaatgccctgatgcagaccgaacatgaccagcacctgccacagaccgccgaccagcgcaccggtgaggaccgggctgaagtcatgggctgccataaacacattgccgatgatatcgctgatccaggtagccacagggccgacggccagcagggtgagcggcacagtgaccagcagggtcatggccgggacaaagaacatcttgataacggtgggcgtgactttcttgaagaacttttccaccttggagccgacccagaccgccagaatggccgggacgacggtggaggaatagctcatgagcagaacggggatgcccaggaaggtggtggtgacgttggtggagaaaatggtgccctcaaaggcagtgaacagcgtctccgccgaggaaagggccgaaatgttggggtgcagcagcgctgcgccgatggccatggcggtaaagcggttcatgccgaacttttctgccgccgtgtaggccacaaacaccgggaagaagtagaagatcacgtcgccgatggcgttgatgatgacataggtgcccgaggtggtgctgatgagccccagagcgcccagaaaaacgctcagacctttcaggataccgcagccgcacatcaggcccagcagcggggtgaaaatgccggaaaccatggcaatgaagctgttgaacaggctctgtttgcctgcctcaccgtcatcggcgggaacttccccgccgccggccaggccgcccagcgccatcacggcgtcgtaggcgtcctccacgtcgttgccgatgacgacctgatactggccgcctttctggatgacgtcaatgacgccgtctttctctttcagtgcctgggtgtcagctttgccctcgtctttcaggcgaaaacgcagtctcgtcacgcagtgggtcagcgagacgacgttttccttgccgcctacatggtccagaataaatgctgccagcgcagcgtagtcctttttcggcataacctttttcctcctgcctttacatacgcatttggattccgggccctggaatctttcgacaccctcaatatagcacggaccacccccttttgcaattcatttttggacataagtccacttttctgcgttatttacaagaacattcgtccatttttggacatcttgcgagcattcctcttccctgtcctggtggtttcagggaaaatatttcttcgttttttcgttcttatttctatttctgtacgaattctccctctgtcggccccggttcctgtccagttttccatttttctcgtccggttttggacatccggtttgggtcaaaatttcgtccaggattggacatcgggcggccactctgctatactggaatcaggaatccctgttgtgtaagccggcgccagccgtcggaaaggagtttatcatgaccgtactggaatccctgcggcagatgctgcccgaactgtcaaaaagtgagcgccgggccgcggactatcttctgcgctatcccaacgacgtgcgccgcaccacctgcgaggccattgccgaaagctccgggtcctcccgcggcgccgtgatccgcctgtgccagaagctgggctttcgcggatacgcggagttccgctatgccctgcgcgccgagcctgccacacccgacgagtcgggccgcaccaccctacagatatatctggacgagctgcagcgcatggaatcgctgtacgcatcggaggcgctggccagcctggcccaggacctgctgcgtgccaaccacattctggctttggggcagcttcactcaggcatggccgcacagcagctggcgttccggctgaaccggttcggtctggactgcaacgccctgagcgacgtcaccctgatggaaggctatcaaagcgttctgaaacagggcgacgtggtggtgatcttctccatcagcggacagaacacctaccgggacgtggtcattccctaccggcaaaacggcgtccgggtagcgctggtcaccatgacatcccaggctcccatttccaaactggtggacgacgtctttttgctgccgcgcatcagccacgcctccaccggatatctgctggacgacgagatcaccttctttacctttattgaactgctgatcgaggcgatgcacaaaaatttccccgagccggacaaagggcagggtctcccggtcacggaatgacccgcagccaaaccaataacataaagagggcgggcgcaggatttgtctgcgcccgccctctttctccgtctccggcaggcggcacggaggaatgcagtcaccgggtcagcagcccatcattttcagagcttcctgaagcacctctttgcctttcatcatgccgtacagccgcatgtcgataacagccaccggcttgtcggggtaggcagcggtgaccttgtccttctggtagcggacctggggtcccagcaggatgcagtcggcatcggcgcccttggcggtcagctcgttgaggctgtacgccgcgatctggcagtcaacgcccagttccttggcagcagcctgcattttggacaccagcagactggtggacatgcctgcggcacagaacagaacaatgtttttcataaaggtatcctccttcaggctttttcgcccattttgcggtaaaggtcgacgatctcggtggccaggtccttgacgaccatggcgtccatcaggtgatcctgtgcatgcaccatcagcagcatgacggggatatgttcgccccggatttccgcctggatcatgtcggtctgggcattgtgcgcctccaccagtgcggcgtcgcactccttaagcagttcgtcggcgcggtccaggttgcccttcttggcttcctggatggcttccatggccaggctgcgggcattgccgccctccacgaccaggttcatgacaagttcatcgtactgatcctgattgatctccatttttctgcctcctcagcgtttgtccattttggtggggacaaaatctcccgtctccatatagaagcgcagcatccggccgcgcagttcccgcaggcggtcggcgtatgccgggtcgtcaatgcggttgaccagttcttccgggtcattggccagatcatacagctgatccggttcgtacaggcgcatgatgtacttgaggtctcccatgcggatcatgcagcctttggtgtgggcggcgtcgctctcgtactgggtggagatgcggggccagtagggcgactcggggccgtgctccggctccatggcctggacctccccgtgaatgcgtccgccctcgcagaacaccgcatcacggtgggcttcgccggtggcgatggtattgcacagcgactgcccgaactggatatagtccggctgcacgccggtcatctcccagacggtggcgggcaggtcgttgagctggaccagggcgtcgttcttgccgggcttgaccggcaggtccgccgcaggcttgacgataagcggcacattggtgagggggtcctcaaagctgttctggcatttctcggtgatgccgtagtcgccggtcaggtcgccgtggtcgctgaacacaaagacgctggtatcgtcgtaaacgccggtctccttgagtttgtccaccaccaggcccagctggtgatcgaaccgtgccaccatgcccaggtaaacggctctgagttcattatactgctcttccgtccagttttgcagcccctgttttgcgcggatgcccttgaggatgcccgccttgccttccagcgtttccagatcggggcggcggggcggcagcttggtgcggtcaatgagagaataccacggctcctcgcatccgtagggcggatgggggtagctgagggtgcagtacaggaagaagggttttgcgtccggctgggcggcgcgctcttccagatagttcagcgctgcgttgacgcagttccagtcaaaggtcttgtccagcgaatgctccgggaagcggcccagatagaaggaataccggttctggaagtcctgcatcaccggcacgacttcgggcttggtgtcccccatcatggcgatatgcatcttgccgccttccacggcgctcttttccacaagatcactgccgtcatagaacttgtcgcagtaatcggtcttggcccagctgccggggataaagtcgttgcggccgatccacaccacctcgtagccattgtccttcatggtcttgaggatattggggtcctctttgcgcatcatgtaatgcatggtgcgatgacccatggtgtggggataccatccggtcagaaagctgcaccggctgggaacacagacggggttctggcagtaggcattggagaagctgacgccctcctgggccagtgcgtccagattgggggtactggccgccgggttgcccatatgcgccatggagtcacagcgcatctggtcggcaacaaaccagacgatattgggtttcttgctcatatcaggtccactccctttcaggcggaatcccccacccccgtaccggggtggggagcagccgccatggatgtttccgtggtgttgtttgaaaaaatcttattcctgtgcggccagggccttttcttcctcaaccgcctgcttgtcgaccatgcggaagaaggggaagtagaccacaaactgcagggcgaccaggacgatctgccagaccgcggcctgccagccgccggccaggaaaccggccagaaccacgggagtgccggtggaaagctgaatgccgttgaggtaaggcaccaggccgatgatggtcacaatgtaagaactcaggaagcagagcagcgggctgaggatcatggggatgagcatcatcacgttgaggaccagaggcacgccaaagaccagaggctcggaaatggagcacagtgccggcagaatggcgatcttgcccagggtcttatagcgctcgctcttggcaaagaagaacatgcagatggccaggccgatgatgccgccggaaccgcccagctgagcaaaggtgaaccaccaggtgttggtcagcatgttgggcagagcttcgcccgcagccatggcttccaggttttccatagcgggagccatgtacagcatgctcaggaaagacatggtgaccatgccgccgtggatgccgaagaaccacagaacgttgcagagcaggagcaggatgacaaaagtgatggggctttcggtcagggtgctcaagggagcacgcagcaggccgtagatcaggtcgttcagggtgccgaagctggtcagagcgcagagctgacggaccgccgcgaagatcacggtaagcgccgccgccggaatgatggcagagaagccgttggcgatctggggaggcacaccctcgggcatcttgatgacaatgttgtatttgacaaacaggttataaatgatggggactacgcagcccaggatcatagcggtaaacaggccgggagcaccgaagtaggaggtggagatggcggatgcaaccgcggtgtcaccctcgcccacaccggtggggatgaccagcaggaacatgaacagggtgacaaggcctaccaggacggactggcctttgcattccagctggtcagccatggccttgccgatgctgaacaccgcatacagcgcgatcatattggtggtgtagttggaaacgtaagcaatgatgggcttgagcccgatggcagtgatcagattctggtatgcctcaatgttcaggccggacagcagcgatgcgatggcgccgaccatgatgatgggcagcagtgccgaaaagccgccgctgatggcacgcaggatcttgctggcagaaagtttgttggcgaagggaatcagcgttttttccatcgccgcctggaatttatccatcataattgcattcctcactttggccgtagtaaatttccgcagccggcactgcgcgcccgcaccggctttcaacggtttcagtataaaaccgtttggaacatttttcaatggatttttgaaaagtttttcattttcggaaatatgttcaaattacagttctcatttttagcagtttcaacaatagagttcgataattcgttctttagttgaaacttttttctttatattctatgatttcctccggttttgctgttgctttttccctgtatgtagggtatcatggagtcaaacaagtggaattttttccaaaccgttccctgagtttggaatccggaggcgattcattatggaccccattgccctgctgcaaaaaaacatggacagctttaccaaatcggagcagaaactggcgcaatacatcctggacaatcctcgctgcgttttgggtgaaaacatttccggcattgccaagtcggctacctcctccaatgctgcgctggtccgcctgtgccaaaaactgggctacaagggattttccgagttcaaattctcgatgcaccggtatcttctctcccacggtgctgagcacagcggcgaacagagcgagaacggctcccccatgcaggctaccattgaagcctatattcattatatccgccagcttcccgacttcgtggacgaagcagagctgcgtaaagccgcccagaccatctgtgccgcgcggcacatctcgatctggggcttcaaccgcaccttccaatctgccaagcagttgtctcaccgtctgggcaggctgggcatcttcaatcaggtcaccgacgattgggtcgtcatgaccgatgattccgagattctgacaaaaaaggatctgtgcatcgttatcagtgttgccgggcgtggccttaccgggcatgaccttttgttccgcaatctccgccaaaaccagtgccccctgattctcattaccatgaaccctaaaattctcgcggcccaatacgccacccaggtctttaccctgccctggatcagccacgacgacgccgacaacttctttgaagaccaggtcattgtctatcttttcctggagctgctgctgtacgaggtcgccaaaatttaccccggctaagcactccccaaaactttttttgaatttttttcgcggattgctctttttctaatctttctttaatcttgctctggtatgataaagccacaacaaacaaggcacacacacttgaccacaagatcgagatagagaaagaaaggaaaccattatgaaaaagactgcattgttcgctcccatggcgctgcttctggctttggccaccggctgcactgcttcggctatggggtcctccaccgcagagacctccgggctggcccccgccgggtcccccagcagcaataccaccgcaggcattgcggggagcgcggattcctcccagtatatcgcccagacggacgccgagagcatcgccctggcggacgctggcctgaccgccgacgccctgtccggcagctacacccgcctggaatacgacgacggccgcgccgtctatgacgtggagttctggaccaccgacaaggaatacgactacgagatcgacgccgtcaccggcgagatcctgtccatggactacgacgccgacaatctctccgcccagagcaccgccgcatccggcaccgtcatcggtgaggacgccgcccgcctggccgccctgacccacgccggcctcgccgagagaagcgacatccagttcttgcagtgcaagctggaccgggacgacggccgccaggtctacgacgtagagttctatgttgactccgccgagtacgattatgagatcgacgccctcaccggcgaggtcctgtcctacgactacgacgccgagtcctacaccgcttcggctgcttccggcacgcagatcacctccgacgatgccaagcgcattgccctggagcatgcgggcgtggcggaagccgacgccacccggctcaaagtggagctggaccaggatgacggccgtaatgtctacgaagtggaatgggagatcggccgcaccgagtactcctacgagatcgacgccgcaagcggcaccatcctcaaatccgaggtcgatgcagattaaatccatctgcaaagcccgtcgtgctccgtgcacggcgggctttttcggctgttttccggcatttttgcgtacgttttcctgtacacgcccccaaaaacgtggtattcttttaagtaagactttgtttttgagggggaggacgaccgcatgggcctttgggcagacgcaaaaaatatccgggacaaagaccccgccgcacgcaacgtgctggaggtcatcattttgtatccgggctttcatgtgctggtcacgcacaagatcgcgcactttctgtaccgccaccactgttttttcctggcgcggctcatcagtcagctgtcgcggcacctgaccggcattgagattcatcccggcgccaagatcggccacaagctgttcatcgaccacggcatgggcatcgttttcggtgagaccactgagatcggcgacaactgcaccatctatcacggggtcaccctgggcggcaccggcaaggacaccggcaagcgccaccccaccctgggggataacgtgctgattggtgcgggcaccaaggtgttgggcccggtctgcatcggggacaatgtgcgcgtgggcgcgggcagcgtggtgctgaaaaacctgcctgccaactgcactgccgtgggcgtacccgccgaggtggtgcgcatcaacaacaaaaaggtatgccccgccgacgacctggaccagcaggacctgcccgatctgtaccagcagcgcatttctcagctggaggcccgtctgagccgtctggaggccaaggtgcagggagaatatccccccgaccgtcccgccggggacgagtcctgatttgccccgtttccccttgctttttccgggcaaatccgctatcattgaccctagcccccgccggggcaaacccagcgtaaggaaggaattgaaccatggctgaattcaagtatgaaattaccgagcgtatcgccgttttgtccaccaatgcaaaaggatgggagcgccagctcaatatgatcagctggaacgaccacgagcccaaatatgacatccgcgactggtcgccctacggcagcaagatgagcaagggcatcagcatgacccgggatgaactggtcatcctgaaggacgttttgaacgaactggagctgtaatggaagactatcgtcagcagttcattgaaatctacaacgccaacatcacccgtcccggcgccgaccggctgctgaactggctggagaccaccgacttttttacggcgcccgcctccacccggtttcacggtgcctgccgctgcggtctggtcatgcacagcatcaacgtctaccaggccatgacccagcacttcttcaccgagggcgaaagcgccgaaagctacgccatctgcgggctgctgcacgacctgtgcaaggcgaacttctacaaggtcggcacccgcaacgtcaagaacgacgagaccggccagtgggagaaagtccccttctaccaggtggcggatcagctcccctacggacacggggaaaagagcgtgtatctcatcgagcatttcatgcgtctcaagaccgccgaggccatcgccatccgctggcacatgggcggcttcgacgacgcggtgcgcggcggcagctttgccgtgagcgacgcttacaatacctatcccctggcggtcaagctgcatgccgccgacctgatcgccacctatctgatggaacagggtaccagcagcgtggaaaacggccatcttcgctgaaagccgccgtttttcctgcccagaatatacaaactcccccgcacagctgccgtgacaggcctgtgcgggggagttttgttttgcttcggtggtcagccgtccagggcggccatatactcgtcgatgcgctggctgtacagttcgggccagcgggcgtcgtaatcggcaaacagctgcttgaaatactcggcctccgcctcgtcgggggcggaagtccgctcataacagtagagggtcaggccattggccagcgggaactcggtcacataggtgtaatgggaggcagcgggggtatcggtgcgcagggcacggttgatgtcccccaccagcgtacccgtctcaaactcgtcggtgaccatcacatatttggaggtccagatccccgtggggaaaccgtgggtggaggggacgctgttctcccacaggatgatgctttgcagctccacgtgggccgggtcgctgtaggcaaaggtgctaccgctgtacccgccggaatcgatgttgatgtagacggtgtcctcggtggtgcagtgttccagcacgaaatcggtcacggcccgcatctggtccaggtcggtgcggcgggtcagatccagggactcatcactgagcaggatcgtccccaccgacgcccccggtatccgcagggcgttggcaaagttcaggcagaagaacaccgcagcccctgccgcgcccacccggaaagccgctgcccggcgcagggcgcagagggccgccagggcgcaaaacgccgttcccaggtagaggggggcaaggatcaggctctggtggtcgcccaaagactgggtgcgggtgaacagcaccatggccagcagcgccgaagccagcgtgacgcaggcagggccgcgggcctcccgccggcgcagcatcaggaccatccccgccaggcagagcaggcagaacagggcgccctgccgctcaaactgggcgatgaggttggggagaaatcccccgccgtaaaatgcgccgtaaatgtcggcatagtcggtggtcagagccgtgacaaaggtgggcagcagcggcaccaccacgcagatcaccgccgggatgccgaacttaagcagattgcccagcacccggccgaaagccttgcgccgggccgcgcccagcaacaccgccacggtatagaccaggtagtacgccagaatccagaacatgtaccatcggcgggtcaggaccagggcaaaggtagcggcgaacaggcagaccagccgtgccgcctccagtttgtcaaagcggtagtccacggtgagcagcagaatgaccgccgcgaaggtcagaccgaaggcatcgggcatgccgtgggtggcgggccacagaaacatgggccacagcaccatagcccccatgcacagggggtagtagatcgccgtgcgcacgccggggaaccagcttgccgctcgctttgccgccatgagcagcgccagccacatgggaacaaaacaggtcagggcatagcagagcatgaacgagttgatggtgcgcggcaaaaacaggtacggcacactgatgaacaggttcatgaacattttgtagtcagcggtgagcagactttccagcaggacatgaacaccgtaaaagccattggtggaaaaggtggagaacagcagctgctgtttggcaaagtagttgatggcgtcctccccgtagacggtctggcggtagaacaccagggcggcaatgaccgcaatgcccaccacggccccgctcaggaaagcccgctggaaaggcttgtctttccagaacggcccttccccggggaaggcgattttccacgtggtgttcagcagcaggcagagcccgcccatgcacagcgcccacatccagaccacaaggaccagtccgccgtaggctgtgagagcgccacccgccagcacacagacaaaggccagcgcgcccagcaggaacaggcggacgcctcggggctgagcggccagcgcagcacggcaacgttgcaatacaggaggcatagggttctcctttcccaaaagacggaggatacaaaaaacaggccgcagtgattgcggcctgtggatcggttactgccacaactcaaacgatctgcggggatcgttctactgtggaatatcattttttgccggagttacttgtcgtccccgcccatgcggttgatggcgtccagcaggctctgcgcaacggcgcggcggctgctgccgctgttatgtatggtgcggcgcaggcgcttaggcggcggcgtgggcttgctttttgccacgggacggacccggcgtgcagcgggggctgcggcgggtgccgctgcggggcgcagacgctcggcagggcggaacatcccggccggggcagtgggcacctcaggcggtgtcggcggcgcggggaccggcggctgcggctcctgttccggttcttcctccggcaggatgggcaaatcgctctcgggcgtgccctccgcaaaatcgttcagcttgacgcccaaggattccagatccgcatcggtatgatccaaagcggcgtaaatcgcagcggtggcgttttccaggtccagcgcggcggcgctgagcttttcgtccacgcggttcaggcgttcccgcaataccatcacgccggcggccagatccttggcgttttccgccatgcgctttttctgttcttcggcttcctggcgcatccggcgctcggcattttcggcatagatccgggcgtccgccaggatcttgcgtgcctcgatgctgggggattccggctgaggctggggctgcggcaccggttccggcaccactgccggagcagcaggctccgggtcaacagcgggagcaggcgcggcaggcgcaggttccggctgggcggctttctcggcacgaagctgttccagctcctcctccaggtcctggcatttgttctgccattccaaaagggttttctggctctggcggtacttgccctggtatccgctggcgcggctttcagagacgctgtactgctcaatgctctcggccagcttcttctcgctctcggcatgatcgctctcggccttttcggcgcggcgggtctgctggagcagctcgtcctgcagcttttccacgcaggtacgggcattggcctgttcctttttcagtttatcgatctgcccctgcagctgacggatctgttcctcatattccatctgctgctgctgggactcgttgacgagtgcatttacatacgccaatacgtcattttcgtcaaatccgccaaccacgcggcgccggaacccctgttccggcactttcggctctcccgacggcatggcgtacccccttttcactgccggtcatcaaacagccggtgccctttccccttgccggagaaacagcacacggctgatgtttttctatcccgcctgaaacacagcgggctatggcccgcagggtgttactggcgcttgttcaggatgctgagcagatcgttgaagtaatcgccgtcatcctcttcctcttcatcggccttgccgggcgtggtgtccagacccgcgccaaagacctcgttaaagacggggttcgggatgacgggatcggggttctccaccggggccggggcaggcgcgggggccggagcgggcgcaggctccaccgggttgaccggagcagcagcctgacgggcagcggtcttgttctggatatgcgcctggatgggctcgtccacggaaggcgtgctctcaaaaccggtggcaacgacggtgatgttcatctcatcggagagacgctcatcaaaggcggtgccccagatgatgttggcatcggggtgagcagactgggtgatcatggaagcggcggtctcaacgtcgtccaggccgatgtcggggctggaggtgatgttgatgatgacgccccgcgcaccggcgatgctggtctccagcagggggctggagatcgcggccttggcggcgttctccgccttgccggcgcccttggcaacgccgacgcccatgtgggcaaagccggcgtccttcatgatggagcgcacgtcggcaaagtcaaggttgatgaaagccggaatgttgatcaggctggaaatgctctcgacgccctgacgcagaacgttgtctgcggcctcgaaagcgttcatcagggtgatcttttcctggctgatgagcttcagacgctcgttgggaatgacgatcaggctgtccacgtgcatcatcagggaagcgatgccctgctcggcaaggctcatcttgcgcttgccctcaaagccgaagggcttggtgacgatgcctacggtcaggatgcccaggtcatgcgccgtctcggcaacaacgggagccgcaccggtgccggtgccgccgcccatgccggcggtgataaagaccatctgcgcgcccttgagcgcgttggcgatctcgtccttgctttcctcggcggcacgctggccgacctcgggatcggcgcctgcaccgcggcccttggtcagcttggcgccaagctggaccttctgggtggccttggagttgatcagggcctgctggtcggtgttcatggccacgaactcgaccccggacaggccggcttcgaccatgcggttgaccgcgtttccgccgccgccgccaacaccgatcaccttaatgtttgtaacattctgcatctcttcgtcgagaacgaacgccatgagagtatccccctaaaactttggatttttatggactgccgggctataaagggcacactagtccgtggataacacatataactgattataagaataccaaattccccccgcaatttcaatacccgaacgccaaattggcagaaaacgcccaccctttccgccctctgcgcgaacggcaaacggcctgttcggggccattttggggctttttccggttttctgtacaggtggagcaaatttccaaaaattttatccgtgcaaggcggaacgcacacaaagagcctttggtttcgccctctccggcagcaaaaccgcgcagcaccgaaatttcaaaaaccggtccgttcataagtacagtccccccgcagccggtcaggctgccgggggactgccgcggcggcaaggcctccgctcccggtgaaaacttcagcaaggtttcctgatatgcactccgcccccacgggcagctttgatttgtacaatatttgcacggtcaggccgggcggcaggccgcccccagggaggccagctcggaagtaagggactgatacccgcggcggatatgtccctcatccagcacgcaggtcttgcccgacgccgccagccctgccaccaccagtgcggccccgccccgcaggtcgggagcgctgaccaccgtcccggtcagttcggcaccgccggtaatgtgcagttcccgccccctggcgcagacgtccgctcccagggcagcaaaacccgccgcacaggcaaaccggttctggaacagcccgtcatagacccggctgggcgcatcggcggtcagcagaacggcggcggccaaaggtgcggcgtcggtggcaaagccgggataggcgcaggcgaacacttcctgcccgcctttgagagggagggacaggtcccggcggatgcgcaccgcattggtccccgtgcggacctcacacccggccgcccgcagaaaatccaggaaggtcccgaaatgggcggggcggcagcggcggatggtgatctccccgcctgccgccgccaccgccgccgcataggtgctggccgcgatgcggtcgggcaggggcgcatagctgcagccgtccagtccgcccgcccggccacgcaccacgattaccggcgtccccgcccccgtgatccgcgcaccgcaggcgttgaggaagtttgccaggtcctccacctccggttcacaggcaacgccccgcagaacggtggttccctcggcacagctggcggccatgagcagcgtctccgtggcccccacgctgggcaggcgcagggtgaagtccgccccgtgcagccgtcccgcccggcgcaggatagcagcgtcggcggtgatctccaccctggcccccatggcggccagaccgtccagatggatatccaccgggcgcggtcccagccggcatcccccgggcacgggcagccgcacctgcccggcccgtaccagcaggggcgccaggtaaaacaccgaactgcgcatggcgccggccagttccggcggcacatccccccgcagcagggacaccggcgacgtgacgatgtccctgccgcaccagcctgcccgcgcccccaccgccgccagcagcgccaggctggtatccacatccgacagccgggggatcccccgcaggcggcaggctccgccgcacagcagcgttgccgccagaatgggcaaaacactgtttttggccgccggcggcgtgatgctgcccgacaaggtgcgtccgccgcgcacttcaatgatctccatgccccaccgcctcctcagtttggcagagagcgcagcaaagccagggctcccctgcgcttgctccccattgcgttcccgcggcattctccgcccggaaaccgctcaacattccactatatgccgcaaaccgccgcgcggccacaggatacaggcccccgcggcaaagattttttgcctgcgccctcacaaaagcagcggctggagctggatgccccgcaaggcgcagtccagcgtgtcgggcaaaaggttcatgtcgcttttcaggctgcacggctttttgtagctgtcgtcctgtccaaagggcacaaaatagaaatgcttgcgctgcaaaagggccgcgatattgcccgcgctggcccccaggccgtcgttggtggagggcgccagaataatgggcagaccgccccggagcatacttttgacccccatggtgacgggggtatcactcaggcccagagccagccgggccagggtggtgccggtacagggcgccacgatcatggcgcaggccatgcccgccgggccaagcggttccgccccctgaatgctgtcgatgggctggtggcccgtcagttcctccagtttggcacgccagtcaccggcacggccgaaacgggtatccatgctgcccgccgaaaagctcagcagcggcagcacatcccacccccgtgcggtcaggcgttcgatctgcggcatgaccgcgtcaaaagtacagaaactgccgcacagggcaaacaccacggtgcgcggcaggtcaatgcgctgattcatatggtttctcccctctcctcaaggatattcaggacggtatccgccaccagttccccggctgtctggggcgcacagcgggcaggcaggctgagggcgtgctcggcgcggatccccagcgccctggcggcggcaaaatccgtaccgcccggcatactggccaggtcgatgaccagcgcccccgccggcaggcaggccagttcgccttttcccaggaccggcgcggggatggtattgaccacggcgtcaaatcccggcagcatgcggcgcagctgggtcaggtccgctgcacggcagcccgcacacctagcccctgcccgctgttccggcgagcgtgccgccaccgtgacccgcccgcccaggacctgcagcctgcgggccaccgcccgccccactttgccgtagcccaggaccaggatggggctttgccagatggtccgctcccgcagctgcatcagaaggcagatgcagccttccgcggtggggacggcattgaggctggcaagttccggccgctgaaaatagtcgatgagctcgatccctgccgcatcggcagcggcctggaccggcgggctgaccttgcccccaagggccagcgttcccggccttgccgcccgcaagatccgggccagatccgccttgcccgcgtccagcggcatgggcagaaggatataatcggcgttgcctgcgctctcggccccggtcacggcgtacccggcgcgctgcaaagcccgggccgccgcgcgctgacgcgcatcggtacccacgatgcagaatgttttttgcatgttctcacccccggcattcatcccatgctatgccggggcggcccatgtggtgcgggcgacggggcgcaaaaaaagaccggaaggctccgctccccgtttggaggagggagaccttccggtcttgcatcttgttggattagattgtgggaaatcagcccacctgcagtgcgccgcactcgccgcgcagaacgctgaggggttccacggccacgtcaccgatgcggacttccacaatggtgctgctgacggtggttccgatgtcgtcgccctgcttgaccttgtccccggccttgacccccacggaccccagcccgtagaaaatggtcttgaccccggcgccgtgctcaatgacgacggtgttgcctgcggtatcgccaagatccccggccagcagaacgcggccgtcggcggggctgacaagggtgtcgccccagcgggtggtgaccacaacgttatcggcatgacggccggtgccgttgtcgatattggcggtgcgctcgttgcgggtacggcccacatattcgggcgcgccgtaggcgagctttacctccaccgagcgctggaaaggcagcgcaaacccgctgtctgcccagtaaagctgggggtctgcggtggttagaagcgcctgcacttccgcgggggtatcctccggtcccaggtagggtgtgacccggcggctcttgctggagacgtcgctgtatccgaactccccggcagtcacgctgagttccagctcctcggtgtagccgtcggcctggaccatcagggtgtagccgccctgagcctgatccgaggggatgggcacgaacgcccaccaggcatctcccagtgcgaagaagtcggtcccctgcagcgtcccggacagggtgggcgcctggtctgtctgcaggttggaaacacggatgctggccacgccgccctgggctaccgtccgcgtattcagacggatggtggggcggataccgatctcaaaggtgaacaggtaggtctgtttgccgctgaccgccgcgttgcggtcggaaccggtctcggtgctgaccaccagttcgatggtgtaggtgccgttggccgggaactcgaacttgcggtactcgttgagggtgccggtaaaaatttcctcttcctcggcgtcggtgatggtcacttccgtctgatacccggaaggcgacaccgtcagtcgcggggcggaggtatccaccgtttcggtcagttcaatgggatcgcggtgaagggtcttggcgtaggtgcgcttgaagctgttgcccaccaccggcacatgccagcggtaggaggccgtctccaccgtctgcccgtcaaaagtgacggtcagttcggggatggactcgtccgaggcgttgacatacagccagcccacgcccacgactgcaatgagcaggatcgctcccagcaccagcaccagccagcgggccaggctgcgccccatgtctcccgcacggtctgcggcggtccggggctcgtcaaagtcctcatccgactcgtcgtcggcgtactcgttctgggccgcggcctgttccgccccggccaggatctgctctaccgagacctgcaccgtgcgggtgatctcagccaggcgggcctgttccgcctcatccggaacatgggcctcctcttccgcctgcgcatcggcgtccaccggccaggcgggaggggtctccggctcgggccgggactttgcgggttcttcctcgctgccggccttgtccggctgcttgtcctcatggggatgcgccggttttgcggccggttctttccgctcttccgcggcgggagaaacctgcgttttttcctccggtgctgccggctgtttctcggtcggggaagttttttcttccgcgggtaccggagttttctcctccgccgggctgtccggagtcttggcgggctgctgtttatgctgctgtccgcccttttcctgggcagagttccccgtgcggcccttgcgggcggatttgttccgcttgcggcgacggcgggaactgctggtgccgccggtctttttccggtcctgcccgtcggccccgggctttgcgtcggttttctgctgcgcgccgcccgccttgccgtcaccgtctgccgccgtatgctgtgccgcctgcggtgcaccggctttcggctgctgtgccgtactttcctgcttttcttcgctcatactttgccaccctgactgtttgctgaacactaaaacgctatattactgtatggacagattttccttgtactgaaggccgctcttgcccgaaatgatcttttcggggtccaccgacttgttgccgatacggacctcatagatcaggtcgtgctgatcggtggccttgcccaccacatcgcccttggcgacggtctggccgcgctggaccgtgacctcacccaggccgaaaaggtaactcttgacgccgcagccatggtcaatgaccaccgtgccgccgctgacttccagcgtaccggcgtagacgaccttgcccgcctggggcgcgaacacatcgctgccgttgggggccgcgtaggtcagtccggtggactgcccgtcccgggtgccgtccaccatgtagatggtgccgtagttgaccgcaatgccgcccgtgctgggggcctggaagttgccggaccagagtttgccctcctccgacgactcgtacagcggccagatagcgttgcggtactgctcggaggccgccgcactggcaggctcagagggttcgctcaccatattgccgtactgcttggcgctgacggtcagcgtgacctgcagttcggtgtcgccgcaacggacgatgatgtcatgtttgccgccctcggtgttgtaggtgacggggatgtaccccatccagccgccgttgacgggatggaaccagacattgcccaggtcggtctcggcggtgggggtgccgtcccccacaatgccggtcagcagaatggcgaccacatcgccctgcaccgcccgctcggagctgagggtcacttccggttgaaagttgacggtgaagttggcctgatacagataccatcccaaaggtttggccggcttttcctcgctgagctgacgcaaggtcaggctcatggtgtactggccgttggcggtgtagacgaaatcggcgtagtcctgggccgtgccctggaacaccgtggtgccgtccgggccggtcagggacatgtccgcctggctgacccaggagggcaggaccagttccggccgggtgtcaccgagatcccccagcttttgctcggtgagggtcgccggggaataaaaactcttgtagacaacgccgccgaaaatgggtaccttccattcatagccgacgttttgcagggcaacgccgccgaaggtcacattttcctccggcatgtcgtcctccccggtcatatagtagaaggcgccgaccgtgccgcccagcagcagtgccacaaacaccaccaccatgagcagccaaagtaacagccttttcattgcaaaattcctcccggtcccgcggtgtcagacgtcctgcggggctggctcagatgtaaaaaagccggatgtccgccggccgcacgtcgccgtgcgccggcggccacccggccagacagaactttttcagaacgaaatgtcggagtccgtgtcggggtcggccatgggctcggcatctgcggaagcggtgtcatcctcttcctcgtcgtcatattcatcgctgaacagcagcttttcgtactcgtcaagctcctgctcacggcgacgcagatacagcgcgaccgcggtcaaaacgcccgcagcagcagccagaaacgccagcgcggcaccaaaagtagactttttcatcatggtggttcaacctcccttgcgttgcgccgcccggtgcggcgcttccctgcgccggcggggccggacgcggtcagattggttttattatacccgaccctgcgggggaatacaacggcaaacctgtaaaaaattggagacaaaaatgattttctttgtcaataacaggccggtacttttgaacaaatcacgtatccatgttcattttctgtttcgtcgcactttttctcaaaaacgcatagaatacgggcggggcaaggccttattccagattccccgtcagggtcatgacggcagccagcgcggccaaaggcgcggtctcgcaccgcaggatgcggggaccaaggcccaccgtctgcgcccccgccgcggcggccagttccgcctcctcgggggagaagccgccctcgctgccggtgatgagggcaatgcggcgcacttgtccctcctgccccagcaggctgcgcagcggactgccgccgcactcataaaagaagagggcgcggtcatagtctttcagctcggcgcagaccgaggcaaaatcgggcagcggcaggctgacctcgggcaggatgcccctgccgcactgcttggcggcctccacggccacgcgggcataccgttcccgcttgacctcctcctttttgggcgccgccacacagtagcggctgaaaaacggcacgacccggtggaccccaagttccacgctgtggcggatgatgtcctccagcttgccctgtttgggataccccacatagagcgtgacctggacgtccggctcggcggcactgggatagccctcgctgaccgagaactccacccggcccggctgcaccgacgtgatggtgccggtgtattccacggcgttggcgtcgcacaagatcaccgtatcccctacccggccgcgcatgacgtcggccagatggtgcgcatccgacccggtcagcgccgcgcgtccggagccgatctcggtggtaaaatagcggtgcggcaagttgttccctcttttccggcagtacgttttctatacaaatcgtactgttttttacaaaatatttctatctgtatccaattttacgccttgcggcagaggatgcagacccagccgcgcttttcgtagacggcttcgggggcaaggccggcggcgcgcaggccgtccaggacctcatccttgcgctcgtcaatgatgcccgaggcgatgaaggcagcgccgggcgccatcagggcaggcaccgccggggccagggacagaatggcagccgccacgatgttggcggtgatgatgtcataggtgccttccgccttgtcggacagatcgcccaccagcacgcggaagtgctccgccacgccgttgcgctgggcgttctccccggccgtgcggacgcacatggggtcgatgtccacgccgtcggcctctctggctcccagcttgagggccgcaatggccagaatgcccgacccggtgccgatgtccagcacccgctcgccgccctggaccaggcggtccagcagttccaggcagagggaagtcgtctcatgggtgccggtgccgaaagccatgccggggtccatggtgatgcggatgcggtcggtgtcgtaatcctcccagccgggcacgatggcaaggcgctggccgatgtccatggcgtgatagtatttcttccaggcgttctgccagtcctcctgctccacgccggtggtgtcgaggctgtactcgatgcccgacgcctccagcctttccttgaagaggggcagaatctcggcaaggttttcatccggggcaaggtacatgtgcaccttgacgatgtcccggggcttgtccagcagttcctgctcaatcaggtccacatgggcgatctcccaggactgctgttccaggtcgctgtaatcttcaatatagatgccgccgttggacaccatcgttgcgatggcttcggcggtttcggcgcagcgctgcggcaccgtgatttgaatatcggtccattccatggcgaatgccctccgtgtctgtttgatagttcccattatacacgaaatccgggcgttgtgtacaggggcaggggtcctcgctttggccgcgccgctgtgttatactgtcgagagaccggcttttgccgggaaaggagagtcccaccatgcagatccgattgctgaacgaaaccgatgccgagaccatccaccgcgaacagatgacccgggactttcccgagtcggaactgaaaccttttgccgccgtgcgcgggcttatgcaccggggattgtatgagcctcttgccctgtatgagaacggcgcccttgcggcctacgcctggcagacggtgctgcccgactgcgagacggcgctgctggactactttgcggtactgcccgagctgcggggccacgggaccggcacccgggcgctgacagcgctggcggaatattacgccccgcgcaaaaagacgctgctcattgagtgcgaacaccccgccgaagcccccgaccccgccgaggccaggcggcgcatcggcttttacctgcgcgccggagcccgggccacggccatggaagggcggctgttcggggtgcgctaccagatctacgccctgccctgcggcggggacgaacaggacgccgtattgcgccgggacctggagaccctctaccgcaccatggtccccgccccctactaccggggcaatgtaatattttacgggggctgagggcagaataagcggcaaagctgtttttcgatacggaaaaggaagtgccgcagatgaaactggaccccgaacgctatgccaaaatgacccgtgacgcgctgccccattccccggtgatgaaagactgcctgtgggcgttttttgtgggcggcggcatctgtctggtaggcgagatcctgcgccagagctggatgctgctctatgacgaagagatggcaggtacgctgaccagtatctcgctgatcttgctgtccgctctggtcaccctgcccggctggtatcagaagctgggcgccaaggcgggcgcggggacgctggtccccatcacggggtttgccaactcggtggtcagcgccgccatcgaattcaaggccgagggctgggtgaccggcgtgggggccagaattttcattattgcagggccggtcatcgcctacggcacgctggcctcctgggtctggggcatcgtctactggatcatggggaagttctgacgaggcgcatcatataaaatatagtgttctgcccgtggtatcctttgccggtgccgcgggcattttgtatgttccaaagcgggacgctccgtgcataaaacccgcgccgcccggcacaataaatgcagtttgtgttgagcgaagctcggatcaaagggttttgctttgccgcaaggaggtttttgcatgacggtccgaaagggcgataccctgatttttgacaccccgccggtcatccgggtctgggcgtcggcgggcggcaaaaaggaggcggaaggtccgctggcggagggctttgacctgctgttcccagatgcgtccttcagcagctgcaagtgggaacaggcggagagcatcctgcagcagaaatgcgtggagcgctgcctgaaaaaagccgccctggaccccgaccagatcgacctcgcctttgccggagacctacaggcccagtgcacggccagcaactacaccatgcgggcgctgggcgccccctatgccggactgtacggggcatgcagcaccatggcggaggggatctcccttgccgcctgctttgccgcggcggggtacgcccggcaggtcctggcctttaccagcagtcatttctgcgcggcggagcggcagttccgcacgccgctggattacggcggcaagcggccgcccaccgcccagtggacggccaccgcggccggggcctgcatcctgtctcccggcggcagcggcgtatccgtccacagcgtgacgctgggccgggtgcaggattacgacatgcacgacatcaacaacatgggcgccgccatgatgcccgccgctgcctccacgctgatgcatcactttgaggatacagattcggtccctgccgactatgacgcggtgttcaccggggacctgggcgaagtgggcaccggccttttgcaccgccagatgcatgccgagggctatgacctgaccaaccaccgggactgcggctgtctgctgtacaacgtagcccggcagcaggtccaggcaggcggcagcggcgccggatgcagcgccgccgtgctgtgcgcttacgtgctgccccgcctggccgacggccgttggaagcgggtgctgtttttatccaccggggcgctgatgagccagaccacctatttacagggggagagcatccccggcatcgcccatgcggtggagctgcgggcacaggacggcgcggacggcgtcagggagggataaatgatgcaatacctttgggcatttgtggttggcggggcgatctgcgtcatcggccagctgctgatcgattacaccgcactgacccccgcgcgcatcctgaccggctatgtggtggccggggtgctgctcagcgccgtggggctgtacgatccgttggcggagtttgccggagccggggccagcgtgccgctgctggggttcgggcatctgctggcccagggggtcgtcaaggccgtgaacacagtggggctgccgggcatctttaccggcgggctgaccgctgcggcaggaggcatcgcagccagtctggtgttcggcgtgctggccgccctggtaggcaagagccacgaccagaactgaccagccgcacacctttatataaaaagaaagccccgtcacggaacaaaggtgacggggctttctctgttttataaggttaccggccggttggaccggagggtcactccccggccagaatactctcccgcttggcgcgggtgcggcggtggaggctctcggccatgacgaacatgatgaccaacagcacacccagataccaggggtacagcgccggggtgatatactgagccagcaggccgaagataggcggcatcaggcagctgcccacgtaggcgaaggccatctggatgccggtcatggccaggctcagggagcggccaaaattggtgggcgtttcatggatgatgcaggggtaaataggcgcgcagcccagccccaccgtgatcagtcccacaaacagcacactctggcccgcggggagcaagatcagcacgacgcccaaagcgattagcgcctggcccaggcggatcatgttctggtcgctgagtttcatggtcaaaaagccgcagatgccccggccgatggtaatgcccacatagaaggtgctggcccagcctgccgccgtgttggcatcgatgccccgggacagggtgcagtagctggccgcccacatgcccgcggtgctttccagggcgcagtagcagaaaaagcagaccagcacctgcaccacgccgggcaggcgaagcagctccgggatgctgcggtgttcgggggtaaagtcgtccccttccagcgttttgccggggcgcttccacaggggcaggctgaacagcaaaatggcggtcagtccgaactgcagcagcgagatgatgcggtagccgccctgccagcttcccccggccaatgcccaacccataatgacggggccggcgctggcacccagtccccacatgcagtgcagccagctcatatggcggctttcatagtgcagcgagacataggcgttgagggccgcatccacgctgcccgcgccgaagccgtagggcagcgcccacaggcagagctgccagaactcggtgcaggtggaaaagccaaacagtgccaccgctgtcatgagcacgctggccgccgttaccccgccggtccccagcctgcggttgaggcgctcgctgagcaggctggagacgatggtgcaggcggagataaccatggacacaatgccggcccaggacagttccgcgcccagttcccccaccatgttgggccacgccgaccccagcagggaatccggcaggccaagactgataaatgccaggtaaatgaccggcaaaagaagcgacgccatagctgcaaatcctttccttcgtcaaaacactcatacgattataccacggtgcggcaaaatgtatagccccttttttccggtccgcacacaaaaagaaagcgcctgccggagcggcgggcgctttcctgttttgctgtctgaggggatgcgttatttcgcgtactcggtggcgcggctttcgcggatgacgctgaccttgatctggccgggataatccagctcgtcctcgatcttgcgggcaatgctgcgggccagcagaataacctggtcgtcggcgatcttgtccggctggaccaggatgcggacctcgcggcccgcctggaccgcgtagctgctctcaacgccgtcaaagccgttacacagggcttccagcgtttcaagacgcttgatatagctctccatgttctcgcggcgggcgccggggcgggacgcgctgatggcgtcggccgccatgatgatgaaggccagcggagtcttgggctccacatcgccgtggtgagcttccaccgcatggatgatggcggggttctcgcggtacttcttgcagatatccacaccgatctggacatggctgccctcgatctcgtggtccagagccttgccgatgtcatgcagcagaccggcgcggcgggccatcgccacattgacgcccagttctccggccatcagaccggccagccaagccacttccagcgaatggctcagcacgttctggccgtagctggaacggaacttcaggcggccaataagcttgaccagatcggggtgcaggctgtggatgcccaggtccatgacggctttttcgccttcccgcttcatggtcagttccagttcgcggcggcacttttccaccgtttcctcgatgcgggcgggatggatacggccgtcggcgatcaggcgctccagcgccatgcgggcgacctcgcggcgggtctggtcaaagctggacagggtgatggcttccggcgtgtcgtcgatgatcaggtcacagccggtggccgtctccagggcgcggatgttgcggccctcgcggccgatgatgcggcccttcatctcatcgttgggcagaggcaccacgctgacggtggcttcgctggtggcgtcggcggcacagcgggcaatggcctggcccaccatctcgcgggccatgttgtcgcactcgtccttgaggttggactggtaggcggaaatgcgcatcgccttttcgtgggtcagttcttcatccaggcgctgcagcagcacggcgcgggcgtcctcctgggacatgccggcgatggtctccagtttttcggtctggcgcagcttgagctgttccagctcgtccaggcgtgcttccaccagctcggtgcgctttttcagatcctcttccttgcgttcgatggtggcggtgcgcttgtccagcgcttcctccttctgatcgacacggcgctcctgccgggtgatctcggcgcggcgctccttgatttccttatccgcttcggacttgaggcggaaggcctcgtccttggcctcgatgatggtttccttgcgtttctgttcggctgacttgatggcgtcgttgacgatccgcttggcttcttcctcagcggagcccagtttggcttccgccgtgcgcttgcggtgctgttcgcccagtacaaaaccaagcgccacaccgacagcgatcgcaacgagtaccgccaccaccaatacgatgatgggtaccattcgattttcactcctcgttggcaaataaaatttcgtaaaccatgaggacggctgcccgcgggcgctttttcagatcatatttgtatttttataagatttatccaaaaccatacgcaaataccgcatccaaagagggtcccgcggcagaaatttccgcggactgccgtcaaaaagcgcagtcaacacccttacagaatacggtcaaacaggcataccgaatgcctgatcaaatcttacaaaacaaacggtgtggcggcttgctgctgcccgcacccgattcaatccaagaaagctctacgacccgccggccgcagtcctttgtatactattaacaattttatctgtaatcggaaggaatgtcaagaaattgttacaaaggcgctttttgaatcttgcatttcgacatttttcgatggtatcataatcagaaacgcaatctgtcagcgttactttataggattctctggcattattttctggtgacaaaaatgaataaactaaaaaatctcctcccgtattggccttccgccctgtcctgggtcctgagcctggctgccgctgccgtgggctggctgcaggtggagcgctccgccgggcaggaaaattatgtcctgctggctctggcaccccggtatctgctgcttggtgtactgacgatcttttcggtccatctgctggtctatgccctgtgcgggcggcggcacattgcaacggcagcgggcgggctgatcgtgacagtgtacgccctggtcaactactatgtcaagatgctgcacggcaccgccattctggccttcgacatcgccaacgcagccaccgcagccgatgttgccgggtcctacgacattgcccccgaccctaccagcatcaaaattgccctgtgctatcttccggtgctggcggccgctgttgtacagtggctgctgtaccgcaagtccagggcttccggtccggcgcctcgcggcaaaaagcgacatctcatccgcatcggctgctgcgccctgtttttgttttttgtgtatttcttcggatacttcggcccctggtccgtcatgccgcgggataccgccacactggccaaggcggttgcgttctactaccaggattacgggtatacctcgtccctggtttcctcgttcctgcttcttgaaaatcctgtggccgaaccggaaggctacgatcctgccgtcctcaccgatttgtcgcagcagacaaaggattaccggcgggccgttcccgagtccgaccccggcagttaccctgacattatcgtgatcctcaatgaaagcttttacgatctgtcccttgtcaccgatcccgagaccgacgttccctatctggatttttaccgctccctgcaggattccgcagtgacaggatacaccctggtaccggatgtgggcggcggcaccaaccgcagcgagttttccctgctgacctccgcccccatgacactgctgcccggcatcacgccgttcagcaacatggacatgaacggacagttttccatcgtgacctatctgcaaagcctgggctacaacaccatggccgcccatcctgccatgccgcagaactatcgccgcggcaccgcctggcctgccctgggttttgagacgacttacttcgagccggatttttcaagccgtgaccgctatggcgaccgcatctatctgacggacagtgccgcatacgactgttttgtcgagatgtacgaagccatgccggaagattctccccgctttgcctatctgctgaccatgcagaatcacggcggctatgaggaaaacagcgaggaagatcttcttgtccatgccgggaccgactaccaagagctcggccatgtcacggacgaatacttgagctgcatttccctgtccgatcaggctctggccgagttggtggactacttcaccctgttgtatcaggagaccggccgccgtgtagttctggtcatgaccggcgaccatgcaccgtatatggtggattccctgaccgatgcctccctttcggggactgaccgggaagtccgccagcgcgccacgccctttgtcttgtggaccaactatcccgccgagtattccgtggagatcggcaatagcgaaggcactctgcccgtcatcgacctgtgcgcccttctcccgctgactgtggagcaggccgggctgccgctgtcgccgtactaccaatatatcctggccatgcgccagacctgtgcggcgtgggacaatctgtccggtgcgctgacccccgacggcagctattctgccgatggagaaaacgaccggatcgacacctggctttccgggtatcatgccctttcctataaccttctgggacctgaggacgagtttgtttccgatctttttctgcccgcagccggctgaaaatttgcagtgaatttgccgctgtacccttgactttaggataaggcggggctattatatcagtaacttcattccgttcaaagctttgaagcggacaaacggacgtatctgcgtccgggtatcagagaacgccgccccggccattttggccctgcgctgcaagcggcctgcccggaagatacctcttaccaccgcggagcgtgggggtgaacccctgccgggcccggcccgttactgccggatacgagtggcgcgccttaccgcgcgcaattcgggtggaaccgtggagcatttcagacgcttcatcccgtatggtacgcattgcgtacgccgaaactgcgggatggagcgtttttcttatttccgtgcgccgtcaggcgtgcgggcctgtacctttttataaggaggaaactgcaaatgaagatcatctacaaagacggtaccgttgccgagtgccccaaagaagaagaactgcacgttctgcgccacacggcggctcatgtcatggcgcaggccatcaaacggctgtacccccatgccgactttgccttcggccccgccaccgacaacggcttctactatgacgtggacctgggcgacaccaagctcaccgacgaggacctggccgccatcgagaaagagatgaagaagatctgcaaggaaaacctgcccatcaagcccttcatcctgtcccgtgaggaagccgtcaaactcatggaggagcgcggcgaaaagtacaagatcgagcacatggccgacctggcggacgagaccgagttcagcttcttccagcagggcgagtacgtggatatgtgcatcggacctcacctgacctacaccaaagcgctgaaggcgttcaagatcacccagcagtccggcgcttactggaagaacgacaagaacaacaagatgctcacccgcatcaacggcattgctttccgcagccaggacgagctggacgagcacctgaagctgatggaggaggccgcccgccgcgaccaccgcaagatcggcaaggaaatgcagctgttcatgttctgcgacgaagctcccggcttccccttcttcctgcccaacggcatgatcctgaaaaacaccctcatcgactactggcgtgagatccaccgtgacgccggctatgtggaagtgtccactcccctcatcatgaaccgtcatctgtgggagacttccggccactgggatcactacaaggacaacatgtacgccaccaagatcgatgacgaggactactgcatcaagcccatgaactgccccggcggcgttctggtctaccgcagccagccccacagctaccgtgagctgcccctgcgcgtgggcgagctgggcctggtccaccgtcacgagctgcgcggcgccctgcacggcctgttccgtgtccgctgcttcacccaggacgatgctcacctgtttgtccgtcccgaccagatcaccgacgagatcatgaacgtggtccatctcatcaactcggtgtatgagaagttcggcttcaagtattttgtcgagctgtccacccgtcccgagaactccatgggttccgacgaggactgggaagccgctaccaacggcctgaagcaggccctggagcgcctgaacctgccctacatcatcaacgagggcgacggcgcgttctacggtcccaagatcgacttccacctgcaggattccatcggccgtacctggcagtgcggcaccattcagctggacttccagatgccgctgaacttccagctggagtatgtggatgaggacggccagaaaaagcgtcccatcatgctgcaccgcgtctgcttcggctccatcgagcgtttcatcggcatcctgaccgagcactacgccggcaagttccccacctggctggctcccacccaggtcaaggtcctgcccgtctccgaaaagacgctggactacgccaagcaggtcaccgaagtcctgcgcaaggcgggcgtccgcgttgtgctggatgagtccaacgagaagatcggctacaagatccgcgaggcccagcaggtcgaccgcgtgccctacatgctggtgttgggcgccaaggaggccgaggccggtaacatctccatccgcgaccgctccggcgagacgacccagtccagcctggacgagttcgtcgccaaggttgtggacgagatcaaggagcgccgcagctgagctgaggtcccccgccaggtcctgaccctgacactgtaaacaaaagaccgcaccccgagagtacatctcctgtgtgcggtctttttgttttgctttgccgccgggcaacgggcgggatgcgcggcccggcattttttggcgggtattccccgccctgtcccgggcatgctatgggcggaggtgttttgcatgacttatctgaattgcagtgaacaggattgctgtcacaacaagggcggatgttgctgcctggattccatcaagatgcaccacaacagcgcccacaccgccatgtgtgccagctttgccagcaacgagggctacgccaacgccgcggtggacaacgctcccggccaggccgagaccgacatccgctgtgacgacggcgcctgccgccacaacaaaaaccacgcctgctgctccgacctggtgggcatatcccagggccggaccggcccctgctgcgccgcccgggaggaatgaatcctccccctgccggtcttttcccaaaaacacccccgcggaaagatgccttgctttctgtgggggcattttgtttgttcgcttttcccgccgttccggcgatagttcaaccgttcccggcctgctgctgggcatggggctgggagccgcccgccaggcgtaagcgttttccttttttccacggcagacacaacgaaaaagacctgcggcaaaatgccgcaggtcttttctggtgcgcttgcgggtactcgaaacccggacccactgattaaaagtcagttgctctaccgactgagctacaagcgcatatttgctttaacagcttatcgattatagcattccccacccgctttgtcaatacttccggggcggggattttaatttttgcccatgcaacggcacaccggcaagaaaaatgtagcattgcgggcggcggcatggtataatgacttgttagtaattttgcagcaaaggagggcgtgccgtgcagcgtctggaaggccttgtccgcaaggcggtacaggactatgagatgatctcccccggtgaccgcgtctgcgtgggcgtgtcgggcggcaaggacagcgttgcccttaccgtggcgctggggcggctgcgccggtatctgggcgtcccctacgaggtagtggctgtgaccctggacccctgcttcggcggggtggagaccgattactcccccctggccgagctgtttgccgccgagaacattccctatgaagtccgccgcaccgacatcggccccgtggtgttcgactaccgcaaggaatccaatccctgcgccctgtgcgccaagctgcgccgcggcaccctgcacaccgccgccaaggaactgggctgcaacaagattgccctggggcatcatctggacgacgcggtggagaccttttacatgaatctctggcgggaggggcgcatcggctgcttctcgccggtgacctggctgtcccgccgggaactgaccatgatccggcccttcatcctcgccaccgaggcagaggtccgccgggccgtgaaccgggaaaacctgcccgtcatcaaaagccgctgccccgccgacggcgtcaccgtccgggaagagaccaagcagtttgtgcgggagatgagccgccgggacccggcattccgtcaaaaaacgctgcatgccctgcaggacagcggcatcgacggctggaagcccatccacaccgggcgcaaaaaggactggtagcgccccgggcgccgtacatatgaacatgggaccacatccatgttcaaggagggtattcatccatgcgttttgaaaaacactgctgggccgagatcgatctcgacgcactgctttccaactatactctgatccgccgcaccgtgggcggcaacgtctgcgccgtgctcaaggccgacgcctacggccacggcagcgtggctgtggccgaggccctgcacaaggccggggtctccgcctttgcggtcagctgtctggcggaagcccggcatctgcgccgccacggcctgaccgagccgctgcttatcctgggctacaccgatcccgcctttgccgacgaactggcggcgctgggtatcacccaggcgctgttctcccccgagtatgccgccgagctgtcccgggccgccgccgaggccggctgcaccgtgcgctgccatctcaaggccgacaccggtatggggcgcatcggcttcaatctgcgcaccgactttgacaaggccatgggcgagatggaagcctgctattccctgcccgggctggagatcaccggtattttccagcattttgcggtggccgacagcctgaacgcggacgacgacgcttacaccaactcccagcacgacctgtttgtccgggcggtggaacggctgcgggccgacggctttgatcccggcaccgtccactgcgccaacagcgcagcccagctgctccatcccgagtggcgtcacgatctggtgcgggcgggcatcattctgtacggcctggcccccagcggcgaggtgggcagcgccgagctgcgccccgccatgaccctgaaagccgtggtgacccacgtcaaatggctggacgccgggcagagcgtcagctacggccgcacctttaccgccgaaaagcccacctgcgccgccaccatcagcgtaggctatgccgacggctatccccgccgcctgtccggcctgggtgccatgaccatccggggcaaggccgccccggtcatcggccgggtctgcatggaccagaccatcgtggatgtcaccggcattcccgacgtgcagcccggggacgaagtcatcgtctttggccccgacgccgcgccgggtgccgacaccgccgacaccgtagccgaaaagaccggcaccatcaactatgagatcatctgcggcatctcccgccgggtgccgcgggtctacctgcaaaacggagtccccgtacggatttggaacgacctggaggaaaactgaatggcacgcgacaacattcgaaatttctgtatcatcgcccacatcgaccacggtaagagcaccctctccgaccgtatcctggagctgaccgacagcgtggataagcgcaccatggaggatcagatcctggacgacatggagctggaacgggagcggggcatcaccatcaaggcccgggccgtgaccatgcgctaccatgccgacgacggcaaggaatacgaattcaacctcatcgacaccccgggccacgtggactttgcctacgaggtcagccgcagcctggccgcctgtgagggcgcggtgctggtggtggacgccagccagggcgtggaggcccagacgctggccaactgctacatggccattgaccacaacctggaggtcgtgcccatcctgaacaagatcgacctgcccagcgccgaccccgacgccgccgccaaggaagtggaggacgtcatcggtctgccctgcatggacgccccccgggtgtccgccaagctgggcgagaacatccgcgccgtgctggagcgggtggtcaaggacgtgccgccgccccagggcgatcccgacgcgccgctgaaggccctgatctttgacagcatctacgacagctacaagggcgtcatcgtctacgtccgcgtgttcgagggcaccgtcaagccgggcgacaccatccgcctgatgagcaccggcgcccagttccagctggtggaagtgggccacatgggcgccaccagcctgaccccctgcgacaagctggaggccggcgaggtcggctacctgactgccagcatcaagacggtgcgtgacacccgagtgggcgacaccgtcaccctggcgtccaaccccaccgccgaggctctgcccggataccgtaccgtcacccccatggtgttctgcggcatctaccccgccgacggcgccgactatcccgacctgaaagatgccctggaaaaattgcagctcaacgacgcttccctgagctttgagccggagaccagcgctgccctgggctttggcttccgctgcggcttcctgggactgctgcacatggagatcatcaccgagcgtctggagcgggagtttgacctcgacctcatcaccaccacccccggcgttcagtaccgcatcaccctgaccgacggcacggtggagatcatcgacaacccctccgcctaccctgacccggcccgcatcgccaagcaggaggagcctttcgtcaacgcccacatctacactcccaatgagtatgtaggccccctgatggacctgtgccaggccaagcgcggcatcctgatcgacatgaaatatctggacgagacccgcgtggatctgcactaccagctgcctttgggcgagatcgtctacgatttctttgacgccatcaagagccgcagccggggctacgccagctacgactacgagtgggaggactggcacgagtccaagctggtcaaactggactttttgctcaacggcgatctggtggacgctttgtcccttatcgtctttgcggataacgcctactccaagggccgccgcatctgcgaaaagctgaaggagaacatcccccgcgccctgttcgagatccccgtccaggcggcggtgggcggcaaggtcattgcccgcgaaacggtcaaggccatgcgcaaggacgttctggccaagtgctacggcggcgacatcacccgtaaaaagaagctgctggaaaagcagaaggaaggcaaaaagaagatgcgccagctgggtaccgtcaacctgcccagcgaggcctttaccgccatcctcaagctggattcggattcctgatccgctgccaacacaaaacaagccggctccccgcaaggcgaatgcttcgcccggcggggagccgtttttatatcctgtcaaaagttatatttacgggcgggcaagctccaccgtgccggtggcaatggtccggcaaaaagcccggtcgtgctccacaaaaagcaaggtggggcggtactgtaagatcagctcctcgatctggcggcgggaaagcacgtcgatatagttgaggggctcgtcccagacatagagatgcgcccgctggcacaggctgcgggccagcatcagcttttttcgctgcccggcgcttagctccgacacctgcttttcaaactgcacccgctcaaagcccagcttgcgcaaaatggccagaaacaggcttttgtccacgcggtgtgcctcggcataggcgccgggagtgccgtcgaagtcctccgggctttggggcaggtaggagatgaccagcccggaggccgtctcgcacaggccgtcatgggggatctcctgcccgcagatcagccgcagaatgctggactttccgcagccgttcggcccgaccagtgccagccgctccccgccgtgcagttcaaaggtcacgggggcaaaaattgtccggccgtcataccacaccgaaacttcccggcagcgcaccaggcaggcggcgggatgctccagcggatgcagcttgagggcctcggcggtctccaggttcttcagcagggatgccttttccgcggcggctttttcccgccgggcctcgatgtttttggcccgctgcatcatccgggcggactgatgccccacgtatccccggtctacccgcagcccagagttccgggtggcgtacttgcccttttccaccttatccgaccaggcggcggcacggcgggccccctcctgcaggcggccgatctcccgggccaggcggtcattttccgccagctccctggcatcgcggcagtcacattcccgctgccagtcgctgtaattgccccgcatgagggagatgcccgtccgttcgatggagagcatatggtcggcacactcgtccagcagcatacggtcgtgggacaccagcagaaagccctgccgccggccactcagataccgccccagccttgcccggccctgggcatccaggtggttggtgggttcgtcgatcagggggtagcagccttcccgcagaaacagcgccgccagcatgacccgggtctgctccccctgggacagggtggagaaggtccgttccaggaactcctcccccaggcccagcaggctcagttcccggcagatcatccagtcaggctgttcttcggtcagctgccgggccaccgccatcacgctacggcccgggtccggcaccgggtagggaaacagtgccggggtctcctgcatatggatcttgccatggccgggaaactgtcccgtcaaaagacgcagcagcgtggtcttgccccggccgttgcgcccggtcaggcccagcttccagccggaatcaaactggatgttcacatcggtaaagatcgggtcatagctgcccggatagctgaaattgagatcagaaatttgaatcagtgacatgaggtgatgcctccttccggtgcgcggcatccatcgccgcgcagacaaagacggaccgcaggaaacccacagttttcccacggtccgtctctgcccatgccccgtcctgccgcagaaaatgcagcaggacgggacaaaaaggcacaaaaacagtgggaggatgcgcggttccctgcgcgggcacaccaaagcggagacggtctgtcttaccgtcccttgtgtatggttcgcccgaacgttcagcaggtaaccttgcgcatccttccacctcatttccaaatcatatcaagcgcagtatagcatatcccctgcgcagatgcaaggagcggacggtcagccggttttctttttccgttttggttgtacgccagggaaagactatggtataattgagaaaactttcccgtgcaaaaatgccggagattttccggccgccatttccggagcacggcacttgcgtataaaacagtgagcattctgcccgctgatttgaattgaagaaaaaaggagagatttcccatggtatcccgcattgttctgaacaccatttcctaccacggccacggcgccatcgagaacattgttcccgagctgacctcccgcggctacaagaaggccttcgtctgctctgaccccgacctcatcaagttcggcgtcaccaagaaggtcaccgacctgctggacgctgccggcttcgcctatgccgtgtacagcgagatcaagcccaaccccaccatccagaacgtccaggacggcgtggaggccttcaaggctgccgaggccgactgcatcgtgaccatcggcggcggctcctccatggataccgccaaggccatcggcatcatcatcaataaccccgagttcgccgatgtgcgcagcctggagggcgtcgcccccaccaagaagcacgcggtgttcaccatcgcagtccccaccaccgccggcactgccgccgaggtcaccatcaactacgtcatcaccgacgtggagaaaaagcgcaagttcgtctgcgtggataccaacgacatccccgaagttgccgtggtcgatcccgacatgatggcctccatgcccaagggcctgaccgccgccaccggtatggacgctctgacccacgccattgagggctacatcaccaagggccactgcaccatttccgacatgttccatctggaagccatccgcctgatctccgagaacctgcgcggcgctgtccagaacacccccgacggccgcgagggcatggctctgggccagtacatcgcgggcatgggcttctccaacgtaggtctgggcatcgtgcacagcatggcccacggtctgtccgccctgtatgatactccccacggcgtggcctgcgccatcctgctgccggtgggcctggaatacaacaagagcgttgccggcgagcgttaccgcgccgtgggcaaggccatgggcgttgcgggcatcgatgacatgagcgttgaggaagccgccgacgccaccatcgctgccgtcaagcagctgtccgccgacgtgggcatccccgccaacctgcagggcatcctgaaggaggaggacgtacagttcctgtccgaatccgcctttgccgatgcctgctgcccgggcaacccccgcgacaccagcgttgaggagatcgctgctctgtacagaagccagctgtaatttccgctgaaactccgggcccggggttctctcccccgcccgaacaaaacccggcccctgtcccgcaggacaggggccgggtttttgtgtttctataccaggaaaagccgccttactccggctgggtgccgaagatgcgctttttcaccgcctggccggtgggggtggcggccaggccgccctgggcggtctcccgcagggcgcagggcagcgcctcccccacttcccgcatggcgtcgatgcactcatcggcggggatgcggctatggataccggccagagacatttccgccgccgtaaaggccaccgcgatgcccgccacgttgcgcttgacacaggggacctccaccagaccggccaccgggtcgcagaccaggcccagctggtttttcagcgccatggcgcaggcatcggcgcactggcggggcgtgccgccgctgacctccaccagggccgcggcggccatggcggcggcggaaccgcattccgcctggcagccgccctgggcgcccgcaataaaggcgcggttggcaatgaccatgcccacggcccccgccgtgaacagcgccatgacggcctgctcctcggtgcagcggccctcgtccaggaccgagagcagggtccccggaatgatgccgcaggaccccgccgtgggggcggccacgatcttgcccatacaggcgttatattccgacaccgccagagcacgggcggtggcatggttcaaaaagctgccggtgataccgccggtggcggcgtaagcctgcattttggcggcatccccgccggaaagccccgacgccgagcgcaggtcgggggacatgcccgccttgacggcattctgcatgactttcaggttttccagcatccgagcgtagaggacctcgggggccgtctccatctgggcggcctgatcctccagcacgacgcgggaaatgggctggcccgcggcttccgccgcttggcaaagctcgtcaatggtattgtatgtcagcatggatgcacctcctttggggcatggtcagaccgcctcgatcagttcgacgctgatgacgttgggcagcactttcaggctgtcggtcagggcaggcggcacatcgccgtccacctcgatagtcatgacggcatggccgcctttctgggggcgggaaagctggaagttgccgatattcagccccgaacaggccatgacgttggtgatggccgcaatgacgccggggacgtcgtggtgcagcacgatgagggtgttgtactggctggtcaccgccacccgcatgccgttgatctcgctgaccagaatgttgccgccccccaccgacgcgccctggatcactgaggtgtgtccctgggcatcggtcagggcaatgcgggcggtattgggatgggcgccaggcagcgacgcggtcttgaattcgtagtgcaggccgcaccggtccgccagttccagggaggtgcggatacgctcatcatcggggcgcatgcccaggatccccgcgatcagcgccttgtcggtgccgtggccgcggtaggtctgggcaaaggagccgcacagcgtgatctcggcccggacggcgggcgcccccaaaatcttgcgggcgatctggcccagccgggccgcccccgccgtgtgggagctggaaggcccgatcatgaccgggccgatgatatcgaaaacattcatggaaatcgttcactttccgcggccattcgggagccgcatggtttccaccgtgccaaaagccggggtctgtcccctatgcacggacatagtaacagtataccgttttccgggccgtctgccaatatgaaattttgcttttttgtgtgcggagagcaaacgggtcggtcccggcggcgggtggcgtttggccgggcggcggcatagcctgtaacgggaggtgctttttatgccaaacggaaatttacgggtctataccacggtcgccgggcaaagcgcgccgcttgccggggtggtcgtgaccatatgggacgagtcgggcgcccagcgtgcccgcgtcctgaccgatgacagcggcgcgtcgcccgatatatccctttctgcccccgaccgcgccctgagcctggacgagagcgacaccacggtacgcccctatgcagtctaccggctgaccgcatccctggagggctggcggacccagaccatcgacggcgtgcagatcttcgacggccagactgccgtggcgcggctggaatttttgcccaacgacgtcgccctggccagcgtgcggcaggccgatgtctccatcccggagcatcccctgttcatcgggggcgggtccagtgcgcccgcgccccagggtgagccgctggacgcccgggtgctgaatgaggtggtcatcccccggaccatcacggtgcatctgggtgcgcccacctcctccgcccgcaatgtgacggtcggtttccaggactatatcgccaacgttgcctccagcgaggtctaccccacctggccggaggaagctctgcgggccaacattctggcgcagatcagtctggcgctcaaccgcatctataccgagtggtatcccagccggggatacagcttcaacatcaccggatcgccggggtatgaccaggcctacgtggacgggcggacggtctttgacgtcatggagcggctgaccgccgagctgttttccacctttgtgcggcgttccggttttgcggagccctatttcaccgaatactgtgacggcaagaccgtgacctgcgcgggcatgaagcagtggggcaccgtggaccgcgccaacgagggcaaaaacgccctccagatcctgcgctattactacggcagcagcattgagctggccaccagttccaacctgaccgccatccccgaaagctaccccggcacgccgctgcgtctgggcagtacgggaacggcggtatctgtactgcaaaaacagctgtcccgcatcgccaaggactaccccggtttcggcaaaccggacatcaccgggacctttgatacggccaccgaaaacagcgtcaaggcattccagaaatatttttccctgacggcagacggcgtggtggggcggtcgacgtggtacaagatcagctatatctacgtttcggtaaaggacctggccgaactgaccagcgagggcgaggagttcgacgccgtgatctcggcgggagcctggccgggagtggtgctgcgccggggcagcaccggcaccgccgtggagcaggtacagttctggctgtccggactggcggagtttgacagttccatcccctccatcgcggtggacggcaatttcggcgcagggaccgagcgggcggtcatcgccttccagaaaagcgccgggctgacggcggacggcattgtggggcggctgacctgggacgccctctacgccgcctgggtcaacgcccagagcgacatcggcggcacggcatggcccggcacggtgctgcgctcgggggccaaaggcaacagcgtgcggcaggtgcagttctggctgttgctggccgccggaaattacagcatgctgccctccgtcacggtggacggcagctacggcagtgccaccactgcggcggtgaccgccttccagacttacttcggtctgaccgccgacggcgccgtgggccgcgtcacctggaacaagctcaacgaagtgggcattgccgtggcaaacgaactggtggaccccaacatccagcccgggcagttcgtcaccaccctgcgcctgggcagcagcggcactccggtgcgggcggcccagtattacctgcgcatcctgtccgcctattacccggcacagcccaccctgacggtggacggcgtgttcggacaggggacgcaaaaggcggtcattgcctggcagcagcacgcgggcctgactgccgacggggtgatcggacggctgacctggcagagcatctaccagaatgccatcgagcttgcatccagcggttcggtggccagggcgcgcaccgcccccgactttaccgccacccttgcaccgggggattcggggccggacgtggtctggctggcccgtaccatgcagttcctggccgcctggctggacggcatccagcctcccgacagccagaccctctattttggggattcgctggaagccagcgtccgcagcgcccagcggacctttgccctgccggagaccggcgtggtggatgccgacgactgggcgaccttcaacgccgcggccctggccctgctcagttccaccccgcccgccgcgcggccggaaccggacggcatctggccgggccacgccttgacccagggcagcgcaggccccgccgttttgcaggtacagcgctggctgaacatcgttgccagtgtacggccggatgccctgttcgttcccgagaccggggttctggatgccgagacccagaccgccctgcaaagctatcagatccgggccgggctggagcctttgggtattgtggacgacgccacctggcaaagcctgcaagcggccgccgccccctatgagcgcacgctgcgcggggccatttccatgaaggagggatgacaccatggcaaaagtttttgtttacgatgcctacaccgacaaattttacacctacaccctgtccgagagcgatcccatgccgtacagctacggcaccaccctgcgggtgcgggagttccgcggttcgtccaagtcctcagtgctgtggacgacggtggccgccatggaggcctggaacctgacccggcgcagctacggcgcgggcatccccgtgggatatgccttcaagcgcatctgggagggcggccacggcaccaccagccagcactatgcgggcgtggcctttgacgtgggccaaagcaccaccagcgccaaccgacgcaagatctacaacaccgccgtggacaccggggcgtgggggtacgtggaacccttgtccatgacccccacctgggtccactttgaccgccgctacggcaagcccgcctgttccggcaccacggcaggctaccccaccgtgcgccggggcagcaaaaacacctatgtcctgattttgcaggatgccctcaacgccctggggtattccaccggaacgctggacggcatcttcggcagcaaaaccgagtccgccctcaaggcggcgcagaaatccttcggcctgaccgccgacggcatctgcggatgcagcagctggaaaaagattgcctccgccgtagtgggcatcggccgtaccgccacggtcattgacccgtaacccgcgtaacctgtgacaaaaagcccgccggcatccgtttgggagccggcgggcttttctgttgtttggactatgttcaggcctgggtgccgtcgatctggttgatcaggtcgatcacttcgttcagcccttcctgagagttggcggacaggaaatagaccagcagatagccgtccttttcgctgacaaagtagctcatggcggtggtcaggtcaacttcctcggcgacggtggtcatgttcagctgcacgccggacagggggcccagggtagtctccacggggtcctccgcagtgaccgtcagcccgtccatcacctgcatcatggcgctgacctgctggacgtattcttccgccgtcatggaaggcgtcccggctgcggcgggattgacaacatcgcagaagaatccggcggtgccgtctgcccgcatggcgtaaaagtcgtaggtatccacctcactggtctgggccgagagagcatccgggtccatgttcagactgtccgccacatagtcactgccggcgcccacgatctgcaggatctgctcggcggtcagaggcgtccaggtatccggcagggtgaaggtgatgccggtccagctgttggaataggtctgtccgtcccaggttcccagctggatctccgcctgctccgcttccggggtgggttccggcgtcggctcgggttccggttccggggtctgttcggcagcgggggtggattcggacgtggtctgtgcagcggaagaaccgccggaagaacagccggccatcagggatacggtcatggccagcacacacaacagggatacaatacgcagtttcacagggggacctccttttgcacggcggcaggagatccgggcggaaatttcaccgcccggcacagggaatgtttctcccgccgttgagcgctttctcttaatttgataattataccatttctacattattctgtaaattatttttgtgcagcttttacaagtgtccgttccaacacgcaaaaagccgccccttcccggaggaaaggggcggcagatgggatgagggatcagagcgccatcaatagttggagctcttcagctcgaagtaagccttgggatgagcgcagaccgggcacttctcgggtgcgtgcaggccaatgtagacaaagccgcagttacggcactgccagacctgctcggtctcgcgggcaaagacacggccgttctcgatgttggcagccagagccttgtagcgctcctcgtgctccttctcgatctcggcgaccatggagaacaggcgggcgatatcgtcaaagccctcctccttggcctcggcggccatacgggggtacatggaggtatgctcctcgttctcaccggcggctgccatcttgaggcaggtcagggtatcggggatctggccgccctccatcaggagcttgaaccagatcttggcgtgctctttctcgttgtcggcggtggaggtgaacagagaagcgatctgctcatagccttccttctttgccttggaagcgaagtaggtgtatttgttgcgggcctggctttcaccggcgaaagcttcccacaggtttttctcggtcttgctgcctttgagttccataatcaattacctcctgattcaaaataaagtgtgtgaatgacttgtgtcattattttttaagatttcgtctgaaattataatacactaccgccctgtcaaagtcaagggctttttgcgaaatttctatatttttatttacaatattacgacaatgcttgacacgggccatcggataaggtatcctaataattaagattgaatctaaaatattagaaaggatccatcgccatgaccagacaacgtgctctgatccttgagatcatgcagaacgatcccggccacctgacggccgacgagatctttgccgaggcccgccgccgcatgcccagcatcgcccgcggcacggtataccgcaacctcaagctgatggagcaggacaaagagatcgcccggctggaaatgcccaccggtcccgaccgctttgataagacctcggtaccgcacggtcatctgtactgtgacggctgccacagtctgcgcgacgtccccgtggtggggctggtgcgtgagctggaagccgccatcggtaccgaagtgcgctcctaccagctgacggtccactacctgtgccccgagtgccgccgcgcccaggaaaagaatctgcattgaacattctgccagccccgccgggcctgtgactaccggcgcgggccggcagtttcttttttccgggatttttcctgccccctataacattccgggattttttccgtgttatacaagtgaaaggacaaaaaagcaagcgttcccggcggcgggcgtccctgcaagccttgcgccggatattgcccaaaggagtgtgagtaccatgaaaaagacccgccccggccttcgcatcaccggccttgtgctgaccgccgccctagtgttcagcctggcaggctgcggcgccaaaagcagcggcaacggtgccgccgccgagagcacgacggaatattacgccgcggatgcctccaacaccgaaagcgccgccgcaccgggagcttccgccccgctgatcgccccggaagccaccgccgagaccgcccgcaagatcgtctataccgcaaacgtggatctggaatccaccgactttgccgccgcccagcaggccattctggacgccgtggaggcatccggcggttacctgcagagcacctatctttggggcaacgcccaggacgccgaccggcgggccgagtattctgtacgtgtcccggcagaaaattattcttctttcctgacctccatcggacaggcgggcaacctgctgagccagagcgagagcaccgacgacatcacctccagctacattgatgtggaggcccgtctcagcgccctggaagcccagcgcgaccgcctgaacgaactggccgaccaggccgagaccaccgccgacctgctggagatcgagagccagctgtccgacgtgcagtaccagctggaaagctacaccatgcaactgcgttccatgcaggatcaggtggcctactccaccgtggacatctatttgagcgaagtcgccaccctgacccccaccggcgtctccttcggcgaccgtctggccgaggctttcttcggcggctggaacgcctttgccctgctggtgcagaacgttttcctgggcatcgtctatctgctgcccctcatcctggtggcaggcgccatcatcgccctgtgcgtggtgctgggccgccgacgtgccaagcggcatccccgccgtccgcgccccatgcccccggcacctcccgcaccgccctccggtgcaggccctgaagccacctatgccccgcctgccgggcagccggagaacgcctccgcccccgccggcaaggccgaaccgggcaatgagccgccgcaggcgcccaagtccggtcccaaatactgatctccttcctgtcaaatgatacacaaaggcatggcccgcgccggaatcttctccggtgcgggccatgcctgatttttgctgcaaaaacgggcgcgctcccttttttgggaacgcgcccgtcaggctgtgatttacttttcttccagcgtcagggcgatggacaggtccttgagctgctggggatcgacgatgtcaggcgcaccggacatgggttcgccggcgttctgcaccttggggaaggcgatgacatcgcggatggaatccttcttgagcatgagcatgaccatgcggtccaggccgtaagccataccgccatggggaggtgcgccatacttgtaggcatccatcaggaagccgaagctctcccgggctttctcctcggtgaagcccagggcgcggaacatgcggtcctgcagggcgggatcgttgatacgcatggaaccgccgcccatctcgacaccgttgaggacgatgtcgtaggcgaccgcacggcaggcgccgggatcgctctccaccttgtcgatgtcctcggcacggggcatggtgaagggatggtgcatggccatccagcggccttcctgctcgctgtactcaaacagcgggaagtccaccacccacaggaagttgaagagatcggggtcgatgaggtcatgcttgcgggcaatgtccagacggacctggcccagagcggtgcaggccttgacccagtcgttgtcgctgacaatgagcagcacgtcgccggtctccaggttcatggcctggtacaggcgggtcttttcctcctcggtgaggaacttctcaaagctggaggaggtaccgtcggcggtcaggcggctgtatgccaggcccttggcgccgtaggtcttggcgacctcgcccagcttgtcgatgttcttacggctgagcttgtccgccatgcccttggcattgatggcgcggatggagccatttgcctccagcacggcggcgaaaggcttgaactcggtgccgcggaacacctcggtgacgtcctggatctccaggccgaagcgggtatccggcttgtcggaaccgaaacgggacattgcctccgcccagggcatacgcacaaagggagtggccacatccacgtccagcatttctttccacagacgcttgatcagaccctcgttgatggtcatgacatcgtcctcggtgacaaaggacatttcctcgtccacctgggtaaactcgggctggcggtcggcgcgcaggtcctcgtcacggtagcagcgggcgatctggaagtagcggtcaaagccggacagcatcaggatctgcttgtagagctgggggctctggggcagggcgtagaagtggcccggctgcacgcggctggggaccagatagtcccgggcgccctccggcgtggacttgatgagggtgggcgtctcgatctcgcagaaatggttgtcgcagaaataattgcggatgatctggcagatcttggagcgcatgacgatcggctcgtgcatggagggacggcgcaggtccagatagcggtagcgcaggcgcaagtcgtcgttgacgttgatgccgtcacggatctcgaacggcggggtctgggcttcgctgaggatgcgcagctccgagacatacagttccacgtcgccggtggagatcttgtcggtcttggcggcacgctcccgcagcttgccgcggcagatgaccacgtactcgctcttgagagattccgccttggcaaagacgtccttgggggtgtcctcgtcgaacaccagctgcagaatgccggtggtatcgcgcaggtcggcaaaaatgatgccgcccttgtcacggctgcgggcgatcgagccgcagaccgtcatctcctggcccacattcgccatgctgacctcgccgcagtaattggtgcggcgcaggttgcccatcgtttccatagtaatatccccttttcggtaagctgttctggcaaataaacattgacatatcattataccccgcccggcactgtttggcaagccgggcggggcgtttttacggggtttgcggcatcactgccggataaaaatgttcacgctgaccggcgccagctccacataaccggacagctcgtccccaaagggctgggcgccggcacggaagccgtcgcacaaacggcgccagggaccgccgggcagctccacccactgggaggtggtctcggggttatagtagacggccagttccccctgtccgtcggccttttccagcacgaagccgatgagccatccgggcatggccagcagaatgggggccgtctcccctgccgctcccgacagctcgggatgggcgcggcggatgtccagcagcccccggtagtaatccaccagcgggcgcatggcggcggcccgccgccagtccaggcggttgaccgacaagggccccaggtaagtgttgccgtccccctgcttggtgcgggcgaactcctcccccgaaagcataaagggcaggccgcggcaggtcagatagataccggcggccatgcggttctgggccagcaggtcgtcgtcgggggcgtcaaaattggtgcgccccgccaccagcttcagcttgtcccaaagggtgtagttgtcgtgggcggagatatactgcaccacctgccccgccgcgcggggacggaaaccggcctcgccgtcctgccaggcgtccacggcatggagcagatgcaccccgtggtaggggccgccgttgacataaccgggggaacgggcgtcaaacacgccgcccttgatgtcgtcccgggtggcgtcgcagaaaaatccgatgcgcgggtccagcacatccagcgcccctttgtccgacggtctggcccccgtatccatgcaggtgccgcctcccgtccagggttcgccgtacatcaggatgtcccgcccgccgggcagggcgtccagagcggcgcggaccgcgttcatggtctcggcgtcctccagggccatgaggtcaaagcggaagccgtccacgtggtattccctggcccagtacaggcaggaatccacgatatatttgcgcatcatccggcgctcgctggccagatcgcagccgcagccggagccgttggtcaggtgcccgtccggggtgcggcggcagtaatagccggggacggtgcgttccagccagccgtccgcctgataggtgtggttgtagaccacgtccatcaccacgcccagacccgccttgtggatggccgcgatcatggcgcggcattcccgcacccggacctcgccgtggtagggatcggtggaatagctgccctccggcacattgtagttgaggggatcgtacccccagttgtaatcattggggtcggcctcgtcggtgcggtcaaagtcaaagatgggcatgagctgcacatgactgacccccagctgtttcaggtacgccaggcaggtgggtttgccgggatccccgtccaggcaggtgttttccaccgtaaagcccagatatttgccccgccactcttccggcacgccgcttgccgggtctgcggagaaatcccccacatgggtctcccagacacagcgggcgtgggcgggaatgtccggacggcggtccttgtcccagccctccggcacagcggaggccaggtcaatgaccatgctgcgccgcccgttgatgccgcaggctttggcgtaagggtcggcggtgaggacttccccctcccggccctcaaactgcaggccgtagacatagtagacccctgccagatcgccctccatatggacctgccagacaccctgtcccgccggttccatgggacagctgccgtacagcgcagcaccgggttcatcgtccgatccggtggcatacaacagcacccgcacggccgacgccgtgggcgcccacagcttgaatacggtgcggtccttctgccaggacgctcccagatccctgccggtgtaggcgggcagcgccgctgcctgttgttctctcattgccgtcactcctcatgctttgccgcctgtgaggctgatatcatccgcgccaaacgcgcgcagaagcaacggggacggctgccaaccgacagccatccccgtgtagtttgtctgttctgttgttgaccgagtctattataccccgtgttccggacggattgcaaggtcagtcctgtttggtcaggtgccagatatcccggtcgtattccgcgatggtccggtcggaggagaaataccccgccttggcaatattgatgagagcgcggcggctccagcccagggggtcaaaggcatagtccgccagggcctggtccttgcgcaccacataggcgttgaagtcgggcagggtctggaaccagtccttgccgatcagctcgtttttcagccgttccaggttctcgctgcggccggcggccagcatctcggggccggtcaggaagtcgatggcacggcgcaggttggggtcggcctcgtaccattcccgggcgcagtagtcccccgccgcatagcggtggatgacctgattgctgcttgccccgaagatgtagatattttcgctgcccaccaggtcggcaatttccacgttggcgccgtccatggtacccagggtcagggcgccgttgagcatgaatttcatgttgccggtgccggaagcctccttggaagccaggctgatctgctcggacaggtcacaggcggggatgagtttttccgccgcggtgacattgtagttgggcacaaacaccacctgcagccagcgggagacctcggggtcggcggcaatgaccttgcccagggtcaggatggcgtggatgatgtctttggcgatggtgtaggcgggggccgcctttgcgccgaagatgctgaccagcggcaccgccggggtgtggcccgccttgatctcgaaatactggtggatcaggtagagcaggttgagctgctggcgcttgtactcatgcaggcgcttgatctggatgtcgaacatggcatcggggtcgaccttgatgcctttttctcccagccaggcggccagagcctttttattgtctgccttgatctgggcgaactgctggagcaccaccacgtcgctgtcggaagcgtcggtgtactgcatcagctgttccagctgggcggcatcctttttgaagccggggccgatgagggattcgatctgggcggccagggccgggttgcactccagcagccagcggcggaaggtaatgccgttggtcttgttgttgaacttttccgggtagaggcggtagaaaccgttgagttcggtgtttttcagaatctcggtatgcagcgccgccacgccgttggtggagtgggtgaaatggatatccatatgggccatatggacgttgccgccctcgtcgatgacggcaaggcgaccgtcgtcggtgcgggtgcgggccagggcgtccagctgctccatgatgggcatgagctgggggaccaccttttccagatagctccggggccaggtctccagagcctcggccaggatggtgtggttggtgtaggcgcaggtatcggtgacgatctgcaccgcctcgtcaaatccgatgcccttctcccccagcaggcggatgagctcggggatgaccatgctgggatgggtgtcgttgatctggacggcggcatagtctgccaggtcatgcagatcgctgccccgggccacgcactcgtccagaatgagctgtgctcccgccgagaccatcaggtactgctggtagatgcgcagcaggcggcctgcctcgtcggaatcatcggggtagaggaacagggtcaggcatttttcaatgtcggtcttgtcaaaacggatgccgtcggtgaccatggattcgtcgatggtgtccaggtcaaagaggttcagggtgttggtgcggccctcgtagccggtcacggccaggcggtaaagccgggcattgaccgtgtggtcccccaggctgacggggtaaacggtgttggtgggttcggcccagcaatggtcgttcagccagggatcgggctgttcctgctggacaccctgggacaggtcctgccgaaacaggccgaagtggtagcgcaggccgatgccgtcccccggcaggtccagcgtggccagcgaatccaggaagcaggaggccaggcgtcccaagccgccgttgcccaggctgggctccggctccacttcctcgatggcggcaaggctcttgcccgcctgtttcaggcaggcgttgacctcatcatacaaccccaggttgatgaggttgttggacagcagtttgccgattaaaaactcggcggaaatataatacagcttcttgcccgataccggcttgcagcgtgcttcgctttcgcggcggacaagagtgagaagggcaagatacagttccggatcggtgcaatccgcaacaggcttgccggtcagttcaatcagattttgctggatggtccctttcatgcagatcaactccttcattgcagtggacagacgttctgtcaggccgcgcccggaaacaggccggcgccgcaaagggtgctgcggaccgggggctgcggcagggcgcccttcgggctgccccttatcatgtagtattatcacaattcacagcctgtatcttgcacaatccttgcattttatgatactatcctatcatagccacattcccgcgccgcacaaactgtcccacactgccgaaaggaggtatgccccatgccgcagcaggtcaccccggccgggccgcgcatttacaaggaagaaaaactgcacggcagcgcattgtttcctttcaacatctatccctgcaccatcccggacgactttgactcggtaccgctgcactggcaaaacagcatggagctgatctatgtcaagcggggcgcgggtcttgcccaggtggcgctgaacgttatggaggcccgcgccggggatatttttgtactgcctccggggacactgcacggtctgcgtcagtcccccggcaagcggatggagtatgagaatttcatcttttccctgactctgctgggcggagcggacgacgtctgcgcccagcaatacctgatgcctttgcagtcagggcggcagactttgcccgcccgcctgtccctggaggaccccggctatgcctcggcggccgcctgcctggccgatgccgaggaattctgccgcacccggcgcagcgggtttgagctgggggtcaagggggccatgctgcgttttgtggcactgctgctggcagagcagaacctccctcccgcgccgccggacagcgtgggagccgcccggctgaaaaagctgcttcagcgggtggaggacgactgcgccgcccccctgtcggtggagcaggccgccgccgaatgcggatgcagcgccagccattttatgcggtggttcaagaaaatgaccggcactaccttcggggtctatctcaatgaacggcgtctggccaccgccgccgaactgctgcgcaccaccgacgacacggtactgagtattgccgagcaggcgggatttgaaaacctgtccaacttcaaccgccggttcaaggcccggtacggcgtcacgccccggcagtaccgcagcatggcatgacccgcagacaaacagaaagctcccgctccaaggtcggataaccggtcctatggagcgggagctgtttttgtatgggaaatcagagatccgggcgcaacgttcccgccgcacgcagaaggtccttgacggcctcgctgcccatgaccaggccgcaggcagccggcacaaaggcattggaggccggcaccgtgcggcggccgggagccgcctgctcgccgtcgtcgtcctccgccaggggaggcaggggcggctcggcggaaaagaccaccttaagcttgcccagacggcgcttgcggcattccaggcggacgatgcgggccagaggacagacgctggtttgggagatgtccgccacacggaaggccgtggggtccatcttgttggccgcccccatgctggaaagcaccggcacccccgcctgtttgcagcgttcaatgagcatcagtttggaggacacggtgtcgatgcagtccaacacatagtcaaactgcgtcaggtcgatctggtccgccgtgtcggggccgtagaacatccgcagggggtggacccggatgtccgggtcgatgtccgccgtgcgggccgccatcacgtccaccttatactgccccagcgtggaatggagggccaccagctgccggttcaggttggagggagcgacggtgtcgttgtccacaaaggtcagctcccccactccgctgcgggccagaacttcggcggcatggccgcctaccccgccgatcccgaacaccgccgcgtgggcgccccgcagcgtgtccagggcgggctgacccagcagccgccgggtacggttgtattgttcctgcatggtggtttcctccaaaagcgcgagtgtgatctgtgttgttgtacgcagccgctttatgccggttccagggcaagacgcaccacgtccccctggcggacggcaaagcgggtatgttcaccataccgcacacacccggtaaagtcaacatcatagcccagattttccgggtaggcacagatgcacagcaccactcgctcatcctccacaaagatcagctgggtcatgccctcccccatggtctcggaaatttccgggctgtcaaaaccgataacgcgggcgatctcctcccggctggtgtagggttcaaagctgtacaccgcctcccagtcaaagggaactgcctgttccagggtggtggagccctcgggcagggcggtgagggcgcttttcagccgccgggcgttgcggaagctctccacctgggagaacaccagccacagccccgccaaagtaacggccagaaaaaggcccgcaaaaacagcattccttttggtcatggcattattcctcctcaacaatttccgtgccggtacagacaccgtgggaaaacgtcagttccagctgtccgtcgtccagatcgatggaaaaggtcccgtcggtgatccagtaggcgtcgccgtacacacgggcgatttcctccccggtacggccgtcaaaccagccggcctcgtccagggcccgggcggcaaaggcggaaatgcggtcgttatacggcacgccgcactggaccagcaggtcggtgtccaccgtatcgatgaccccggcctgatagcgatcgatgttttcccggacgcagaagccctcgatatcggcgcagcacagcatactgaaactgcccgccagaaccagcaccgcgatgcgggcggccgggacggggcgcatcagccacagcaccgccagcacgcaccacaccagcagcacggccaaaaaccaaccggacagcacccgctggggcgtggggccgtaaagaaggatatacgttcccagcttggaggccgccagcgcggcaaacaggaagccgaacccgccgaacaccagcatcaggcggcgctggctgcccggctggcgcagagggcgggcgccgaacagccgcagagcgacaagcaccacaaagtccagcagcagaatgcggcaaagctcccagaaaccggtaacggcaaaatcggaggctgcctgggcagtcaggccctgccctgccgccgtgaaaaactcataggcctgtacggcaaagaacagcccatacacaccgcacagcgcaccgggcaccaggtagccggtggacacgggcaggcggggcagcgaagccagtcccctgtccagggcctgtgccgtgagaggcgcttccctgcggcgcagcccgccgccgatcagcccgaacagccacgcccccaccggaagggacagcacaaagatcagcacggtatccggggacagcaggccgtccagccagccgaacatcccctggcccaggcgtgcgaaggtctcatccacccctgccagctggctccaggcaaatacgcagacggccagggccatcacagcgctgaacgcaccgcccagcgccctgcggcggtcaccgcccacccggcgcaggacattgctgccgccgtgggccagggtgcgcgccctcagcaggaagtcccgccagggcagcaccgtcacgcccatgagcaggtccaccggcgtccagagaccgctctgtcccgcgcagagcattccggtgcggcacatggtccagtagacggcggtggcatgccaggccaaccattgcagcagatagatcgatcccgcatgatcgggaaaaaccatcagggcggcgctctgcaccagccagcagaccatccagaagccgctctcggcggaatcggggcgcttttggctgcgggagagcagctccaccccgatgagatacaccactgcaaacagcagcatggtccagcggtcctttgtggcgccgaacaggatataccgggtatacaggtaggcgggcagatagctgcacaccgccgtcagcacaaagccccggggcggggtccagcgttctttcggctttgcggtaaggtagttctgggtataatcgggcgcacttgaatagaggggacgcgcagcgccctctttgggcatggaatccatatgaaattctcctttttgaaacgccgcttcaggctgcggcgacaggttcagcggatagggtcaggcggatcattcggggtcgtcggggcggtattccagcaggtcccccggctggcagtccagttcccggcagagggcttccagggtggaaaagcgcaccgccttggctttgttgtttttgaggatggacaggtttgccggcgtgatgccgattttctcggcaagttctcccgcgccgatgtgccgcctggccatcatgacgtccagattgacagtgatggacatgacagcagctcctttatacggtaaagtccagttcgtctttcatttttagggcctgctcaaaggcgtgtttgaccacctgcacgatcagggccatgaaccccgccgcaatgcccatgcaggcaaagggaaagtacagaaccgatcccgcgggaatgcagatgatcgccgcggcggcacagcaccggctgatgcggcgcagggcctccaccgtctggggcacaaacacctggccctgttccagccgggtcagaaagcggaagagattgtacagcatccacaaagccagggcagccagcaggtagcccagccccagcatgacccagcgcacggccgggccctgcacccctaccctgccccgggcgatgagccagtccacgatgccggggcccatcaccgtcacggcgatgcagacaaaaaagatggccaccgtgacgatgcgggtcagggcaatgcttttgcggtcgtcccaaaaggacggtttggtttcggtttgtctggacatagggtcagtcctccttccggtatggcaacagcataccacagagcatatcgtttttcaagtgctttttattgtttttcgataatttatttttgatttgcgatatatcccactcacatcccccactccaaagacgcaaaaaagccgcccggcaggccatgtcagcctgtcgggcggtctttcggatggatcagatcttacggcgccggggccaaaaagtcagttccggcctgacgtctgggcggcggggatcatgtgctgccgttcaaacagcgtctcggtggcggaggacatcttgtccgccacgcacaccacggcggcttcccggcagcggggcggggtgagcagggtcagcggccacatatggctgcggatgacgttgcgctcccggtcattcagagtgtagcgctgctcggcgttggccagggcaatggccggatggctgaacccgtgcagcccggcttcgggatggggttcatgccagtcatagaggtaaaagtcatgcagaaaggctccgcgtaccaggctggcctcgtcacagcccaggttcagcctgcggttgagccaaaagctgataaccgccacccgcatgcagtgctcgtaggtggtgacacagccatgctggatatactgccgcatgcgcagtgcgtctgccgtgtccgcccagccgtccagataggcggccaggcacttgagttcctcttccgtcagattcggctgcatagaccctccttttggtctgtatcaaactttcctgccgcccggccggggcctttgcccggctgcccggcggcaccctctttttttattataccgcatttccggggttccgggcaagatacctgccccacgcaaagcgcccgccctgccgggcggcagggcgggcgcgaaaggctgtgatcagccgataagcttagtgatggtggggatcaggccctggatcagaatgaccaggatcaggatgggcagcacaaactggaagtaaggcttgaatgcccggggcatacgcaggccctggccgtcgttggcctccttgatgtagttgtcgaagccccagccccagcggctgacgcagaacagcaggtagaccaggctgcccaggggcagaagcaggttggagacgatgaagtcctccagatccaggacggtggtgccgtcgcccagaggagcaaaggcgccccagacgttgtagcccagcacgcagggcaggctggcaaggaggataaagatgcatcccagcacgcagacctttttgcgggacaggtggaacatatccataacgcaggcgatgatgttctcaaacacggccagcacggtggagaagctggcgaaggtcatgaacaggaagaacagcgcgccccacagacggccgcccgacatattggtaaagacgttgggcagggtctggaagatcaggctggggccggagtccggcgagatgccgaaggtgaagcaggccgggaagatgatcaggccggaggacaccgccacaaaggtatccagcacgcagatgcgggcggcctcaccggcaagggagtggtcgcgcttcatgtagctgccgaagatctccatggcgccgatgcccaggctgagggtgaagaaagactggttcatggcggcgacaatgacgctgcccaggccctgctccatggcacggctccagtccggcagcaggaagaaggcaaggccgtcggccgcgccgggcatggtaaagctgtggactgccagcaccacaatgagcagcagcagagcgaccatcatccatttgctgatgcgctccagacctttctgcaaaccgaagctgcacaccacaaagcccaggacgacggccaccgccatccagaagcccatctcaaaggggtcgcccagcaggtccacaaagacgttggggacagcctcggcggacagaccgttgaaagcgccggtgatgaacttgacaaagtagctcatcatccagccggtgacggtggtgtagtacatcatcagcaccacgcagccgatcaggcaggcccagccatgcagatgccatttgctgccggcgggttccaggttgcggtaggcagccccggcgctggcgcggcctgcacggcccactgccagctccatggtcaggacagggatgcccatggtgatcaaaaacagcagatagaacaaaacaaagacgccgccgccattttcaccggtgacggtggggaaacgccagacattgccgatgccgatggcgcacccggcactgacgagcagaaagcccagccgggaattgaaattttctctcttcactccaaaactctccttttacaaaacgattccaccaaaaatgcggccccgccgcaacaaggccgcataaacagtattataacggttggctgcaaaaaaggcaatcgcttgtgaaaattcatacatcgcgtgcagggttccccgccccgccggtacacaacacaaaaagccgccggaacgcgcacaaaacccgtaggttcctgcgcgtccggcggcgctttgtttttgtatgaatttgcagggcagcccgttcagtccctggactcaggggtggggatctccggcatcagttcattgccgacgacggtgagcatttcatccagcttggccacatcctccggggagaaccgcgccttgacccggtccaccaccgtctgtaagtaggcatagctgatgttatagtaatccagatacttctgcgtggggcagaggtgatattcccgccggtccgtctcggagcgcaccttctgaacatagcctttctggatcaggctgttgatcttgtaggaggcattcggcgtggaaatgtgcattgcctgggcaaattgcgccaccgtggggctgcccagcgccatgatgccctccatgcagaaggactccaccgtggtcagggtcgcttcgcggttttcaaagcggctgaacactttctggtaaaaatgcagcttgaatttggtataaacggtattgaatgcctgatccaacatttgcaaaacctccacagcgggcaatttcccgccgttcaattatccgcggcgtccggctccgccgccccgtgtcgagccaccgcccgcacggaatccaccggggcgggaaccgccgccgggtctgggtccgccgcccgggcgccgaccgccgggacggggtcccgggccgccaaagccgccgcggggcggtctgggtccgccatagtaaggcccgcgcgggggtctgggcggacggggcgggcgcgggggacggggcgggccaaagaagaagaatgcccggggacctccgtagcgggggccacggtaacgggggccgccaaagcgcggtgtggaaagagccagcaccactgccaggatcagcaccacaatgagaacgacagctcccacaggaaagccccctttctgcggagcggcagtgccgcccactgaactgaaatcaccttcggccactgccgagacatccatggacacgccgtagattttggccagctcctctgccagagccatgacggtctgctgcgtgccggtatcgtaatctttattcacccagctgggttccagttcatcgtacaggatacggctgagggtggtggtgggcagcagcgtttccagtccggctccctgcactgcccagtaatcgtcatcgccggaagccagcagaagcagcacgccgttgtccttgtcgtcgtcgcccaggccccaggcgttgaacacctcgtaggcgtagccctccatggtagagttgcccacctggtctacggtatagacaccgatctgcgcgccgcaggtttcactgagggcttctgacagattgacgataacatcctctgtctctgacgagaggattccggcattgtcgatgacaaactcgtccttatcgacctccagcgcagccgcgggcaatgccgccgccaccgcaaaggtcactgccagcagcggtgctgccagccgtttgaacatcccggttctcattgaaatgcttccacctccccgatgccccacagcgtcccgatcacattggccgggaacgccgaaagggtgttgttgtattcctccacagcggggttgtactcattgcccgccgtgcgcaggatgatgtcctgccgggacaaaaattccgtatgctgggtctcaatggactcggtgcttttgcccgcgtcggccacctcgccgtacatgatctccaccgcgctgcccagagccgtgttggcggcaaactggtcggcgggatggctgctgtcggtggcgttccagtcgtccagcgcctgctgcgccgcctggaccgaggccgcgtcctcccccagcacctgcccgcagaggcggatcaggttggctgccgcgtcggcacgcagggaaagatcgttctgcatgctctggccgtgctcattggcggaggcatagatggcctgcacctgattgtattttgtgttgagctttgccccgccgatgccgaacaccgacaccgcggccagcaccaccagggccagcgcggcggtggggcgttttttggccggggcgggcagcttgctttccacctggccgaacacttccagctggggaccctcgatgcggaaagtctcctgttgttccaactgcatttacttcgtctgctccatcagtttggcgcgcagctcgccctcgatgcggcccagctcctgctcagccgcagcgcgcttggctttgccgtcggcgcggatcttgttgagctcatccagcgtgctgatcagctcgcggttggtctgctgcagcgtctccatatccacgacaccgcgctcggattccttggcaatgtcgatggtgccctgcttgagggcggcggcgtttttgcgcagcagttcgttggtggcgtcggtgacggcgcgctcagcggccatcgcctcctggctgtgggccatgcccagggccaggaccatctggtttttccacagaggaatggtgttgacgatggtggtctggatcttctcggccatcatggtgtcgttggcctggatcagacggatctgcgggcccatctggatgctgatgttgcgggtcagctgcagatcgtacagctttttctcaaaccggtcgcacagatcggccaggtcacgggctgcctgggcgtcctccggcagctgggtgcgctgggccttctcgttggcctctttcagctcggtgctgcgcacctgctccagctttttcttgccggccaggatatacatggtcagttccttgaagtagaccaggttgagctgatacatcttgtccagcatggtgatgtccttcatcaggacgacctggtggtcctccagctgggccttgatgcgttccacgttgacgtcggccttctcatagcgggtcttcatggactcgatgttgtagctggtcttgcggaacaggttgctgaaaaagcccttgtccttctgctcattggcgtcaaagcccttgagctcggtgataaggttggtgatgagttcaccggtctcccccatgtccttggtcttgacccgggagagggcattgtcggagaagtcgctcagctttttctggctggctgcgccgtactgcaggaccatctggctgttggtgatgtcgatcttctcggcaaagtcgttcaccatctgctgctcttcgggagagaggggggtatcctccaccttgacgggggtgggctttttggcctcctccaccaccgctgcatcggcggcggggtccagggtcagggtgggagtggcgggcgcggcatccagcgtcaggctgggcgcggcgggggcattcaaatcaaaatccttgtcgttcatgctgtggtccgtcctttcctgtattcagactgccggtatcgaccggtttattgggcgagattctggcttttcaaaatatgatcgagcacctcaatgtcggtgctgatatccattgcttcggcggagtaaaggccatccagctggttttcaaaggctgtggccatggtggcggcattggcgcggacttcgctctggatctgctccgcattgtcgccgcggatgccgccctgttccatgcgggcatacgcccccatgatcttgatgacctcgggcaggtaataccgggcaaagcggtcgatctggggcgccttgtcgggggaagcctccaccgctttgaggatgccccggcccgcccgctccatgcggtccatctcggcggacagccgggcgtcggggatggcatcgttgagggcgtgcagggcgtcgaggtttttctcgatgcccgccagcatggcgtccacgtcctcgctgccggtggcgtaagggatctccttatactggatgcggtcggggcaaagccgggccgacaccagatacaccgccaggctcaagactgccgtggccgccagcccccaaagggaatatacgggaaacaccagcgctcccaccggccaggccagggcggccagccacaggggaagcaccggtttcttgcggatctcctgcagtttgctcattggtatcctccatgcaaacgcttatttcctacattatataacatgacgttgtaccatgcaaatacaaaaacggcgttaaaaccggcaaaacaaaactccatggggctgccgccccgccgcgggggtccgtaaccgcccgccttggcgtttttccgccggatctggcacttttttgccgattttttcaaagccagggggaaagggcattgccccatgcctcggtgagccggggcagcgaccaggacgcattggccgggctggtggacggcatgcacagggcgggcatgccggtgtcccgttccagccagcgggcatacagccgtgcggaggtggaaccgttgcagacgatctgttccacccccagccgccgggccagttccgggacggcgttgggctgtacatcccggatggaggcatccgacgcccccacgatggtgcacttgcacaccacgtcccacacggccagcccgtgttccacgatgatggcccgcttggcctccaggtcctgccaatccggcaccgggctgtgggtcaaagcagccatgagcggccagaaacggttctgcggatggccgtagtaaaacccctgttcccggcttttggggctggggaagctgcccaaaatcagcacccgggctttctctccgcacagcggcggcaggccgggacctaccgggcgcggctcagtgcttttcatgggaaaacgcctccggccacacttcgcggcaaagctgggcgaccccgcattcggcggcgggcggacagctgcggtcggcggcctgcatggccagctcgtcgccgccctggacgcagacccccagccctgcccgggccaggatgtcccggtcgttggagccatcccccaccgacaccacctctgccgggtcgatgcccgaggcggcgcagatgctttccagtcccagggccttgtcctggtcgggggtcagaatatcgcagccgtcgtcatccccgtaaaagaggaagcgcaggccaaggtatccgtaccgtttctggaactcctccaccgcttcatggggcatccgcccgaaagccgaaaaaggcatgttttccagatgccggtcctggtcctcgccgtcgatggcgtacaccacgccccccagctggacctcccgctgatgctgaagctcatagttgacatagacatacggcccgtcgtcaaaattgaagcccagcatgtactcgtaatcctcaaagaagtccaccagggcatacatctgctcattggtcatggtccgcgtgctcagcaccgtccccgccttgtccagcacctgggcaccggcggcgcagatccaataatccggacggatgcgccccagcattttgggcgggatgcccatgcggcagcggccggtagcaatggccaccttgacccccgctttctgcaccgcgcacacggcctccacattctcccgcgggacgacgctctcgcctcccggacgcagcgtgccgtcaatatccaaagtcaaaaggcgatactgcatattgctgtccccctgtatggttaaagtattccccgtatggatgctgcgcctgttgcggcgccgatgggagtattataacaaagcccggcccaaaataaaagccgtagggcctgtgccgggggcaggcatggcggcgcgcagggcggcatatgctggcctgtgggtgttttttggggaaaggggcgttgcagtatgcgggacagtctggatctttcggtgcggtatcccggcaagcggagcattcaccgcaaaaaaatcctggtcatttgggtggcgctggtgtgcgccgccctggccgccgcggcaacgctgcgttacggccccgaggcagtggcctggcttgccgccctgccccagcgggcggacgggctgatcggttcccacctgctgccgtactattccggcaagctggaggaactgcaagaggaaaacgcccggctgcgcgccgagctggccgaaaccagcggcctgcaggcggaaaacgaagccctgcgcaccctgctgcaaagccccgccgccgatgccctgcacggcgcccagcccttgcaggtggcggagcgctggctggacggttttgccctggcaggcagcgccgagcccggcagcgcagtgctggacccctacggccggtttgtagggcgcattgccgacagcagggagcagacctcccccggcatcctgcaggtcgacagtgccgcgggtaccccctgtctggcggaaggctactgcggcgtgctggacatcgaggacggcatctggtatctggacgaactgccccggcactgtcccctgaccgaggatgccatcgtcacgacggcggacggctactgggtgggacgcctggccgccgcccccgtggaggacgagaccgggctttgcgcccgcgccccgctgtgcgatacctcggacgggagcagcagcgtctattttgcgatgcagtgattgtttttgcagtttcttccgggggcttgctttacaaagcgggggctgcgtcgtatactgatagacagaaattcaaccgggagggtaccagtcatgaaaaagcgcggcggaaaaggcagggtgacggctctgctggtattgtgcgctgtggtgttcggcattttcctggtccggctggcctggatgcagttcgtccaggccgattactatgcccagcgggtggccgaggcatccaccacgcggtacacctacaccgtccccgcggcccggggtgacattgtggaccggaacggtgtggtgctggcgcaggacacccccgtgtgggatgtctatctgcggtacccggccccaccgggcagcgacatgacagatacagcaaaacggacgttggaattactggagctttcaggcggcgaggatgtggaaacacaactcgccgctttttgttctgaaatttccgccggggagttcaaactggcgtcgggcatcgacgcggcgcaggcggcccttttgtatgacgcgggtctggtccagagcggcgctttgcgccttgccccccggggggagcgcatctggccggacgggactctgctgccccatgccctgggcacggtaggccccatcaccgccgaacagtgggagacgctggagggcaccggcatcgccatggacgccgacatcggtcagagcgggctggaagccgcctatgaatcgctgctccacggcaccgacggccgggtgcgcgtcaccaccggagacgcgggcgtcattgccgaggaagagacccgggagccccagcccggggcgacgctggtgctttccctggatgccggtttccagcgcagcgtccagaccgccctcaccgactatctgcacaccttgcagaccaccaaagccgccgggtccggtcgggaggccaacgccggggcggtggtcgtggtggatgtggagaccggcggcatcctggccgcggccaactccccctcctacgacctgtccacctaccgcagcaactacgctgccctggctgccgatacctcggccccgctgctggaccgggtggcccagggactgtatgcccccggctccgccttcaagcccgccgttgccgcggccgcgctgtcctccgggcttatcactacatcggacacggtgcgctgcaccggcacctaccgctattactccgactaccagccgggctgcctgcagatcggccacagcggttccattgatctggtgcaggcactgaaatacagctgcaacatctatttttatgatgtgggccggcgtctgggcgtggatgccttttcccgggccgcccggcacctgggcctggctgtggacaccggcgtggagaccgcccaggctgggggcagcctgacctggaccaccgatgacaattaccgggaaggcctgactttgcaagcggccatcggccagggcaacaccgccgtcacaccgctgcagctggcgtcctatgcggcgtcgctggccaacaacggggtgcgcctgcgcctgcactatgccgaccgggcgctggacagcaccaccggggaggtcctctggcaggcggaaccggaagtgctggacaccatgccgggaggtgaggaagtgttcggtcccatccgggagggcatgatccagatgtcccagacactgggcgccctgcggggcctgaacatgacggtggcctgcaagaccggcagcccccagcggccagacaccatgcccaacggcacccactacaccaactcggtgctgatcgcttatgctcccgccgacgatccccagatcgctgtggccattgttctggagtacggcggaggcggcgccaatgcctctcccctgctgcgcaccgtgctggaagcctgggccgccctgtaacttcggcaaatccgcaaaggaaatattttacaatttttgcccgtttccccattttttgccgttgtcacgccatgccgcgccattgtaaaactgtgtgttttttatagaaaaatctgttgccccacctggaatactgtgctaaaataataaatgggacagtttagccgcatttgagttgcttcccggcggtaattttgtctgttccgcttttttaaggagcatcgagtgaaggcacaaaccattatggtctgttccggcaagggcggcaccggcaaaagcacggtgtcggttttggtaggcgcacggctggcctcgctgggcaaacgggtcctgctgatcgaactggattccggcctgcgcagcgtggacatcattgccggcgtatacgggaagaccgtctacgacattgaagacgttttgtgcgggcgctgcgacggcgacaaggccgtggtgcaaagcccgctgtatccggggctttccgtcatcagcgccccgtatgaaggcggcattgtgcggactgcgccgctgtcccggctgtccgcagccatgacgccctattttgattttatcctttttgacaccgccgcagggatgggccccgcctttgaagcgggcgccgctgtctgttcccgcgcgctgctggtgctgacgcccgaccccgttgctttgcgggacgggcgcattgtggccgaccgcctgatcgccgacggccacccccaggagatgcttcgcctggtcatcaaccgctttacgccggagtgtttcggcaagcacgcccccgttttcgatctggatgaatgcatcgacaccgtgggcattcagctgctgggcgtcgtacccgaaagcagggagcttcagcgctgtgccatgctgggcgaggccctgccggaggattgtctggcgtccatggcgggcgctgccatggcgggccggcttttggggcagcgtattccgctgctgttctgactgccttttacggcatatctgtacttttgagaaactcgcaacattaacatatatcgccgggcggatgcagccgcccggaggaagtggggtcctaaatgacgattgcgttggtcgcacacgataccaaaaaggaactgatgatccagttttgcattgcatactgccagatcctcagccatcatcacctgatcgccaccagcaccacgggccgtctggtagcggaggccaccggcctgaacatccagcggttcctgcccggcggacacggcggtgaccagcagatcatctcccgcattgcctgcgacgaggtggacatgctgctgttcttccgcgatcccatctcggccaagcccaccgagcccaacgagatgaatctgctgcgcatctgcgacgtgcacaacatccccgtggccaccaacatcgccaccgccgaggtcctgatccacggtctggaaaacggcgacctggactggcgtaccatcctcaatccgcagaaccactgagcaccgttttgttccggtgccatattcctatggcagaactgcgcccgtatggccgcagccgctttcgcgggacagagaccccaccctctcccccgcgggaatgtctgcccagatccttacacagcaaaaaccggcgacggaaattccgtcgccggttttttgttacttgtcaaatcgcaagttcgctcaggcggacacgtgcctccagggcatgaaccgtctccagatccggcgggcaggtcccccgggtggtcacggcaccggcggacaccgccatggcaagacgcaggcagtcctccatgggcagaccctcatccacaccgcaggcgatggccgccaccatggcgtcccctgctcccacggtggagcgcgccgccacctgaatgaccggagcgttccagacacggtctccctggataaagcaggcgccctgcccaccccgggagatgcagaccagtcccacgccccgcccggccagggtacggcccagaccgatgagttccttttcatcgggggtatggtccagcccgaaatactgcgtcagttcaaaggcattgggcttgatgatgtcaggcacggcttccagagcatgggcaaacagcggaccgtcggcatccacaaagactttggcccctttttgtttcaggctcagggtcaggtcccggtaaaattccggcggcacgccgggccccacgctgcccgccagcacgaacagcgtgccgggagcagcatagccttccagtttggcggtcagggcgtccagtgactcccgagagatatggggtccctgctcgttgagttcggtcagttccccgcccggctccaccagtttgaggttggtgcgggtctcgccgggaacggtgaggaaatccggacggatgcccccgccgggccattccagcagagtctgacggatgctctgtcccgtctgtccggccagaaagccgcaggccacactctgccgccccagcgccgcgatggtcttggagacattgatgcccttgccgcccacgtcactgaccacaccgtccagccggttcagcgcccggggacacagacggtcgatctccgccgtcttatccatggccgggtttaccgtcaccgtaacgatcatatcctccaccgccttatccctgatatggccccgggccggttcgccgcagcgccggggcctttgcgtttcttgtattgtacaacaccccgtccgcggcggcaaggggcgggcgtcaccgctcccacatggtatggagcagaccggaaaccgcatccccgtcaatgacgtcccgggcgtcggtgccctcgccctcggtctttgtggcggcgctcacctgatcccactcgtcccagcggacgtagcagaccgcctccgtctcatccagcagatcgttgaacagcatggcctcttccccgtcggtccagccgtcctggaacaggctggaccacaggtccacatacatggtgaacaggacaatctctttctcctgcccgtccacccgcagggtgcggtaacttgcgttaaaagcggtccagcttttgccgtcctgcatggtgacatggagggcgttgtcctccgtcagggtcacggcggcgatatcttccggcgcaatggtcagctgcacgctcctggcatagttccggaaccccagcaccagcccgatcaccagagccaccgccgccagccccaccagcagggcaggcagcaggcgcttgcggcgcagatcactgcggactttgcgcagcgcgtcggcggatgcccgctccctctcggcccggagctggccctccgccccggtgtcgccgtccagggcattcagggccgcccggcagctttcgcagctgtccagatgttcccgcacgtcggcggcagtctctttgccgcataccccgtcgtgatacaggggcagcaggtcgcgtaccagataacacggcattttcatgtcaggtcctccttcagttttgcccgggcgcgatggtaggtcacccgcgcccagctttcggtcttgccaaacagccccgcgatctcggcaaagctcagctcgccgtacacccgcagccagaatacctcccggtaggggtcgggcagccggtgcaaggcccggtgtatccgcaaagccgcgtcccggtcctccagcgccgcgcccacagcctgcgccgggtcgggcggctcgggggccgcatcggggggcaattcccgggcagtcttgcgccgggcgtcgatcagtgcgtttttggcgatgcggcacagccagacattcaccgggcatttgccgtcaaaaccgtccagcgccttgagcgccttgaaaaaggtctcctgggtcagctcggcggccaggtgctcatcgcggcacagcgagatcagataggcatacaccgcgcggtaatagcgggtataaatgctctcgaaatcctccacgcatccacctcgtttcctggaatgttctccgccgggactgccggcgggaaagccgctttcacccaacagacggacagcctgaccgtttcgttacaaaaaaatccgtgttttttcaaaaaaagcggccccgccgcaaaaacatcgcagcggagccgttctgtggttgtaccgttacggcaaactcagcccgggcttattcggcctcggagaactgatccttgccaacgccgcacagcgggcagacccaggtctcgggaacgtcttcccacttggtgccggcagcgacgccgttatcaggatcgccggcggcctcgtcgtaaatgtagccacagatatcgcagacataacgtttcatggtatgttacctcactttattgtttatttattacgggaccgccggtctcccatggagacagaacagtctcagtaatccatcagatccttgaccgtgccggacatggaaaacagttttgccgacagatggtccagatatacaatgcccagtttgttgccggtctcctcgttgtacagatcggccagctggggcatttcacggaaagcggcagcctgtgcctcgggggtgttgtcgaagtttgcggtgccctgcacccgcagccattcgccgcggtcgttggccgcgcagatctccaggttggtgttgtccaaaagctgcttgtacgcagccttgtgcttgccgatggccaggcagagatagccgttataccacatggcaaaccccagcgggcggactctgggcaggtagccgtccaccgtcgccagataaaacaccggattttccttcagaaaactcatgatctcattcatgctaagtaccccctttgtataccggaaactccgcgcccgatcacttcagtgtggccagcgccttcttgatgcggtcggcggcttccacggtccttgccgcgtcgccgaaggcagtcaggcggaaatagccttcgccgcagggaccgaaaccggagcccggcgtgcccacaacattggcgttttccagcagccagtcaaagaaatcccagctcttcatgccggcggggcagcgcagccagacataggggctgtttttgccgccgcagtaccagacgcccgcttcatccagagcggaagcgatgaccgccgcgttcttgcggtagtagtccaggttggcctggatctccttcatgccttcctcggtaaagacagcctcggcgccgcgctgcacgatgtagggaacaccgttgaacttggtggtctgacggcgcagccacatcttgttcaggctctggccctcggcctcaatgccgaaaggcacgatggtgtagccgcagcgggtgccggtaaagccagcaatcttggagaagctgcaaacttccaccgccacttccttggcgccttccacctcgtagatgctgcgggcgcagccttcctcgctgacaaagcactcataggcggcatcgtacaggatgaccgcatggtgtgccttggcccacttgacccactccgccagctgggcggtggtgtaagccgcaccggtgggattgttagggctgcacaggtagacgatgtccgcatcggcggcttcgtccggcatgggcaggaagttgttgtcggcgttggcggccatgtaatgaatggtacggcccgccatgacgttgtcgtccacatagaccgggtagaccgggtcgggcaccaggacggtgttgttcacgtcaaacaggtccagcaggttgcccaggtcactcttggcgccgtccgagataaagatctcgcccagttccagctggacgccccggtcggcataatacttgcggatggcttcccgcaggaaatcatagccctgctcggggccgtagccgcggaaggtcgcctggctgcccatctcgtccacagccttgtgcagcgcctcgatgaccggcttggccaggggcagcgtcacgtcgccgatgcccagacggataacatcctttccgggatgagcggcctcataatccgctatcttgtgtgaaatggtgctgaacagatagctctcgttcagctcggaataatgcttgttcagtcgcatactttggttctcccctcccggcggcagctgccgccgtaaacgtaagcagttcttgtctgattataacacagttgcaccgccgggaaaagtcccgcaggctcaaaactgtgccagcagttccagcagcaggtccagattgcgctcggtcacttccaggatcatcaggtcgcagccgggatcggccgccttttccggggtcaggtcggtctcggcggtcagacgccagcactggtcaaagcgctgctgcaaatagggcatgtaatattcgctgaagctgtcccccagcactcccacggtgcgcgtgtccatggaatacagctcgctgtaattggaggccgtccagttgttttcctccggcagcagggtgtacagcgccgacacgttggccagatcgccggtggtcacgccggtagcggtgaattcataggcatcaaagtccaccgcatccatcccggcggcggagagcaccccgtccagccccagcaccgcgcccatgccgttccagtgggtgtcggtcctgtaatagagaagccggtcgggatcggccagcgcctcgccccggatggcgtcatactgccagctgaccggcgtggaggaatgttcccgcaggtaagccacaaagcggtcggtgcggttttcggtgttgacgatgggataggcgtcgggcatgtactcctggtagacccggtccttggagggcgtgatgtccagaatcagggtgcagccgttttccgccagggtggccgccagccggtcgagagaagcagccgccgcggccagggtctcctcgctgtcaaaggtgtcgggcagaccctgatagttggccaccgggcgggcggcgtcggggccgtccttatagaacagccagccgtcgctgccggccagcacctggtcgctctcgcttttgccgaagagcagatagttcaggttggcattgagggaaaccagctgataccggaaaggggaattgtcggccagaaagttgtccagctgttccggcatctgggacaacgggctttgcagcacctgcggcagaccggtgagcaggcggttttcgtggttatcccgggaaagctgcttgctgaaaatgttgaagatgaggaagctcagccccagcaccccgcagaaaagggcgatccatatttttttgagcatgccgccctccttagaattgggtgtagatgaaggcctggtagttgcccgccgtcacctggacgatgctgaaaaacaacagcacggccagcaaaaccatggtgagcgggcggggttctcggccatccctggcccagctgcgcagacggggaaacaccgcctggaccgggccgcacagcagcgccgccacaaggaagagcagcagttccttgccgcccacaaaggcggccagcgtcatgccgggcgcaccggcctgcagcgtgaccatgccccacaatgcggccagcgcctggctgagccccggcgcgccgaaaaagacaaagccgatccacaccgccgccaccaggtagacatggctgacccagcggggcagtttttccagcagccgggcaaggccgaggcgctcgatacaggcaagcaggccatgccagatgccgaaagctacatactgccatgccgccccgtgccagatgccggtgcagagaaagaccacaaacaggttcaggcaggtgcggcccagactgcagcggctgccgcccatgggaaagtagagataccggcggaaccaggctcccagcgtcatgtgccagcggcgccagaactcgcccaccgtgcgggagaggtaaggataatcgaagttttccggcatggacaggccgaacatttctcccaggccgatggccatgtcgctgtatccggagaaatcataatagagctgaaagaaaaaagctgttgccccggcaaacaataccggcgcgggcagcgtctgggccgggaccgaagtcaccgccgcatagaccgagcccagcgggtcggccagcagcgtctttttggcaaggcccagaacaaaacgctggatgccgttgcagaagcgggaggcatccacccggcgtccgggtgcacgggggtccagggcgttttcctggtcgctccagcgcaggatgggtcccgagctgacatgggcaaagaaggccatgtacacaaagaaccgcaggggatttttggtgggaacgatgtccccccgggcgacgtccacgcagtagctgatgccctggaaggtataaaagctgatgcccagcggcatggcaatggacaaaaccggcagggtgccgggcagcagggcgttgacgttttccgccacaaaatccgcgtacttgaaaaatcccagcgcagccaggttgcagactaccgccgccccaagcagcagacggtttttaggtgcccggccgatggccagccccgccgcccagttgaaggcggtaaaggccagcaggattgccgcgccgctccagcctgcccagatgacaaagagcaggctgaacagtgccagcacggcgtttcgcacccgggcgggcaatatgtagtaggccgcccaggcgagcggcagaaaagcaaagagaaactggaccgaggaaaaactcatggattactcccgtaatatgtcaggaatgggcgggggtcattccacttccgcctcaccggtaaaggccgtctcggcagggccggacagcagcacatggtcgtcgctgcggacggtgatctccagcgtgccgcccagcagttcgatctggatggggacatcccgcgggctgacaccccgcagcaccatggccacggcggaagcgcaggcgccggtgccgcaggccatggtctcgccgctgccccgctcccacacacgcattttcaggtgggtggcgtcccggacataaataaactcggtgttaacgccctcggggaagattttgttcttttcaaagtcggggccgatggctgccaggttcataccggtgggcaggttttcatccggccattccaccacgcagtgggggttgcccatgctgacgcccgcagcgtcccagctgcggcccgcggcctccaccgtcatatggacaaggggcccctcccccacatccacggcgggcaggtccgccgccatggcggaaaagcagcccatctcggcctgccactggccctcacccaggcggcgcagcgtcttgcggccggccagggtatcgatctccagggtatcccggggaacgccgtgggtgtacagaaactccgccacgcagcgaacgccgttgccgcacattttgccctccgagccgtcggcgttgaacatccgcatggtggcgtcggcgccgggggtggtgggcgggcagatgcagatgatgccgtccgcccctaccgacagatgccgccgggacagcttcaccgaccagtccgccacatgttcgggcagaccggtctgacggcagtcgagataaatatagtcattgccgcagccgtgcattttggtaaaggaaatacgcatgagggttgcctcctgtatcgttgtgagcgcccggacaggcgctcgggtcattatctgatgtttaccttattataccttgtgaccggcaccgagacaagaaaaaaccgtttttgcccccgggtgcagaaaaagttccctgccccgcccggacagcccttgacaagagggtatggatacgctataaaatttagtagcaatcgtcttgtaaataaggcgagattatgccgcgcccgcggcgtggcggacggacaaaaggagaatgcacgaatggaatccgaggtttttgagcgcatccgcgagtatctggccgaccagctcgacgtcgaccccgaaaagatcactcccgacagtgacattgtggaggatttcggtgccgacagtctggacgtcgtggacatgatcaccaccctgtccgatgagttcggcgttgacatccccgatgaggagatcgagaatttccacaccgtgggcgacgtcgtgcagtacgttgaggatcggatctgaaacggattcccctgcggcgtaagacgcttgcaggggccttttttgttatatctgcacagttcgccccgccgggcactgtgcaatgtgtgaggagttttgaatcatggcaaacgacaagaaaaaaatggtcgaggcgatcaccgcgcaggaggtcgactttgcccagtggtacaccgacatctgcaaaaaggctgagctggtggagtattccagcgtcaaaggctttacggtgctgcgcccctacggctatgccatctgggagaacatccagcaggatctggaccgccgtttcaaggccaccggtcacgagaacgtggccatgcccatgctgatccctgagagcctgctcaaaaaggaaggcgagctggtcaacggctttgcccccgaggtcgcctgggtcaccaccggcggctccgagccgctggaggagcgccttgccgtgcgtcccaccagcgagaccatgttctgcgaccactttgcccgtgtgctgcagagctaccgtgacctgcccatgctgtacaaccagtggtgcagcgtcgtccgctgggaaaagaccacccgtcctttcctgcgcacccgtgagttctggtggcaggaaggccataccatccacgagaccaaggccgaggccgaggccgagaccgagcagcagctgaactgctacgccgatttctgcgagcacgacctgtgcatccccgtcatccggggccgcaagaccgacaaggagaagttcgcgggcgccgaggccacctacaccgtcgaggccatgatgaaggacggcaaggcactgcagagcgccaccagccacttcttcggcgacaagttcagccgcgcctatgacgtgaccttcaccggccgcgacaacaccctgcagtatccgtaccagacttcctggggctgcaccacccgcctgatcggcgccatcatcatgacccacggcgacgacgacggcctgatcctgcccccggccatcgccccctaccaggtggtgatcgttcccgttgccgcccacaagcccggcgtcatggaaaaggcccgcgagctggcggagagcctcaagaccgtggcccgcgtcaagctggacgacagcgacaaggctcccggctggaagttcagccagtgggagatgaagggcgtgcctctgcgcattgaggtcggcccccgtgacctggagcagggtcagtgcgtgctggtccgccgtgacaaccgcgagaagcagttcgtcaagctggaggacctgcccaccgccatccccgccgcactggaggctctggccaaggcgctgtacgaccgcgccctggaaaaccgcgaagcccgcacctacaccgccaccaccatggacgaggtgcaggagctggtcaagaccaagtccggtttcatcaagaccatgtggtgcggcgacgtcgcctgcgaggaagccatgaaggaaaaggccggtctgtccagccgctgcatgcctttcgcccaggagcagctgtccgatgtctgccccgtctgcggcaagcccgccaagtccatggtcgtctggggcatcgcatactgatcaaagccggtttttccgccgcccggctgcctgaatggccgtgaagggcggaattccaaaaagaccgtttcggcgcaccggcaagggagtcccctttccggtgcgcctttttttacacaacgtctacgccaaaaggatggaacgtcatgatcgtcttactgtcgtttgtgctgtatctgctgggcatgatactggccgccgtgggcagccgtctggccgggcgctgcgccacctggtgctttgccctgtgcggctttcccatgtgggtggtgggcgcaacggtggcaagtctctgcattgccctgccccagctgatgctggcctttctggcgtcggggctttccatcaccgccctggcagtaggcacggccctggccggcgccgtcaccgatgtaggactggtcctggcggtctgcctggtgcgcaaggatgtcaccgtggaccggggcgagctgatccgcaaatgcctgatcctggtaaccgcctgcgtggtcctgctgctttttgtgcgggacggccttctgagctacaccggcgtgggattgctgatggggctttttgtgctgtttgtgatggagaacatcgtctatcagcaccacaccgtctacgatgaagagatggaccttatcaccgtgcagggctactccgacctgacgaacttttccgcccgggatgacggcaccgtgcgcttccctgccatgaacgtcaaaaactccctgcggaacctggccggggtactgtgcggcggcggtgtgctggttctgggggcctacgccctattgtatgcatcggtggtgtttgccaacctgaccggcaccatccaggccctgtgggcggccacgctgctctccctggggttctgcctgccgctgctggcggaggctttccaccaccccttcggctcggcctggaagcgctttgccgagcgctgccgcatctatcccgcctggacgttccccatgcaggtcctcaacgctgccatcctgaacatcacgctggtcctgccccttgccagcctgatgtaccgcaagcgtctgcccgtgggcgagcagttccgcacctacgaggtccccgcctgcatcgtcatggcccttttgttgctgctgcctgcccttttcaaacgcaagctttaccgctggcagggtgctgcctgcctgaccgtctacctgtgctatctggccgcggtgctgtttgccccgctggcgggtgcgtgacagctgccgtataatcgcaaaaggccccgccttcctctcatgcacagaggaaggcggggccttttagtccggaactaccgttatcttaaacaggcaaaacgttcctattaccggtcaaaggtggtggacatggtggtggaccaactctcaccctgcttcaggctggcggcgcaggggcgggactcccattccagagggccgttggcctcgccggtcatgctctgccacggctcgatgcagacaaagcgcagaggcttgaccggggtcgcccagatcagcacatagggatagccctcaatgttgcagctgatacggcggccggtgtccttttccacgatggccagggacttgctgcgcaggttgaccatgcagtggctgtcatggtcgaacaggtcgtcggtcagcgggatgcggcgggtattgcgggccaggtaatagtagttgttgccctccagcaggccgttgggcagggcgctgacacacaggggggactcgatctcatcaaagcggaactcgtagtcctcggtggtgtgcttgtcgtcaaagggaatggcaaagccgggatggaagccgataccaaagcgcagggtcggctccacggggttttccaccgtcagcttgtggtggacagtgcgctcttccagcgtaaaggtggagcgcagcacaaaggcatagggccagaatttcagcgtctcgttgttggcatgaagctcgaactccagcacgtcgtcggtctggcgcaccagggtgtgctccacgtcacgggcaaagccgtgctgcggtgcctgatactccaggcccttggcgatcattttcccctcggtcagtttgccggtatagggaaacaggatgggcgcgcggcgcggccagacggacgggtcaccgttccagagcatctcggcgccggtgcgcttattgacgacgctgtacacctcagcgcccttgctctcaacagtcaggcggataaattcgttttcaatggaatactgcatgggattacctcctcagctcgtttgtttcccccggcatgacgccccggcggtgatttttgcggggcgtcacaaatcgctgccgcggcctgtccgcgggcagccgttttgccggcagagcttttctttcagtatagcgcaaaaagagcaaaatgcaaagtaggaaagcttttcccccgtgcactctgttttcaaaactgtcacaaaatgttcaaaaaatccacatcttccaaatattgacatttttgtcaagaaatcgtatactatccacaagaagttgggccttttacgtcgaaacacctgcatatttggcgatgcatcgaaagcccaatccgccgcttagagggaaaggaaggccgcaatcatgaaatctaccggcattatccgcaacaccgacaacctggggcgcattgtcctgcccaaggagctccgcaagagcttcggcatcggcaccgacactccccttgagatcttcaccgagggcaacgccatcatcctgcgcaagtaccgccccgcgggcagctgcgatttctgcggtgaggtcaccaccgacaccgtggaattccgcggccagcacatctgcgcggcctgccgccgggccatcagccagctgtaacaaaaagccgcacggcagccaccggaaaaggcgggctgccgtgcgggatctgttttgttgcggccgtcagtcagcgctgcaggctgcggacaacttcctcgctgtttttgatgaggttgagcaggctggtggcgtgacgcgggtaatcggtggtcaggctggtggtggtcatgtccagctgggatgccgcccgggctgcctgggctccgtcctccccggacagaagcgccagcaggtcgccttccgcggcatgcatggcggcgtcggtatatccctcccagcgggcacggctgacccggaacatgctggccacatttttcggcgacgcctggtacaggtgccggaacatccggtaaacggagagcatcaggtaattgctgaccgcggtgaccagcgccttatccttgcaggcagccagcttgtcaaacaaaatatccagcgagttctcgatgagctttttatacatgacgggcagaacgctgccgcggtaaacgctgtccgcggcggatgccgtgtcgggcagatcctccacgctgatggtctgaccgttgcgctccgcactgcgccccagcagataatcgcaggatacgccgtaataatccgccacctgcacgacaaattccagaccgcattcgcggatgcctttttcataatgggaaagctgggcctgagagatccccaggtcctgcgccgcctgtttctgcgtgattccgcgctctttccgcagcaacgtgataatgcgattgaattccatcgccatgatttcctgccgtccttgcccgggcgtttcgtgtgctgcgccctccgcaggggcgcagtatggccatgcccgaaattgttctacgtgctgtacattatatctttgcaaaaacattttgtaaatacaaaatccgccaagttttgacggcgttttttgacattttgatggtcgtgtcaaaagcgggacaagatatagacacatgtgtggcgctgcgtgtgcaaatattgtacccggaaaaattatccagtaaaacgccttgaaaaattgtaatcaaattgtaatatttattttgaacaaatcgccctttcttgtctgcctgtgacatgccggaacggcttttccggcctctgccaaacggctgcgcggcaccggattttaccgtatggtcagcaaaaatacgcgtccgcggaattacaccgataccgaacaagagccgtttccggaaggctgcaagccccgggtcccggcaaagacttttgccaaaatcgccgggccggcggcgggataatccgggcaagagcacgccaagatttttatatgtgttttatcaaaggaggagacaccttttgaaatactacaaactgcatttgatccgccacggcctgacggccggcaacctggacggccgctacatcggcagcggcaccgacctgcccttgtgtgacgagggccgtgcccagctactggacctgaaacagcagttcacctatccccaggtgccgctggttttctcgtcccccctgcgccgggcgttggagacggcagagatcctcttccccgacgccaaggtgatcgagctgcaggacctgcgggagatggctttcggcgtatttgagaaccgtcccctcaacgagctggtcaaggacccggccttttcccgctggatggaccccaccagtcacgacattcccgagggcgccgaggaccgcgtagctttctaccgccgcaccggcgagatgctgatgaaaatgtttgagtatatgttcaagacccacaccgaggaagcagcctgcatttcccacggcggcgtcatcatgagcatgctggcccagcacgccctgccccagcgcaagccggaggagtggatgaccgacccgggcgcgggctactcggtgcgctgcgacgcggaaatgtggatgcgcgacaagctggcggaagccttcgacatcgtgcctgtgggctatctggatggtgtggaggaggagagctgacgctcccctgccctgccttttcctcaaagctacaaagctgcaaacaataaaaagtccccctgccggagtttccggcagggggacttttgtttatctgatatggcgaaccgatacggaagttttctttcaggcttctgccgcgaagggcaccacggtaccgactacccgcccgacccaccagagcatggctccctgggccgcaaggcaaaggatcagcagcaaaccggacaggattttgcttccggtcagttcccgtaactttgtccagtactgctgcgtcagccagatctccgacgcgaagaacaggatatacagccagttccggcgcatcagcatggccagattggacagcgcgtaggcgatcaggacatagtttatcgactgaacggcaagttcaagtccctgcgaaagcctgtctttcatggttcatttccttcggcctgcccgggggtctcggtcagccttccgaggaggtatcctctccgtcggtggcggcatccccttccggattcatctgtgcggccagctcggcctggtagttgtcgtaatcctgcttggcctgggcggcggcttcatcgctgatgccggattccagcagggcgggcttttcgggcagggtctgctcggtgccgtcctcggccacgatccgcagggtctggccgtagtagccgccccagatgccgataaaactcttgccgcggttgaccgtcaggctgttgccatccaggtcggtgagcaccaggggagccgtggcatcgcccttggtccagcggatctcctgccagccgcccttggtcaggtacaggccggtgccgcccgacaggtcatactggcgggtatagccgtcgtccttgacgccggaggaggcatacagaacaaacacgttggtaaaggctgcctgttccccggcgtccacgtccatggcctcggagccgtcggcgttggtcttgaaatagaccccatcgttcaccgagtagtagaagccctcgctgtcgccttccgagaaggtgatgtgcagttccgtggcgttgcgggtctcggggtcggggcgctcaccgaagtcgaacagctggatggtatcgccctcggcggaggtgccgtacaggtccagcccggccttgatgagatcgctggtggtgtaccagcagttttcctcccggtagccgctggcctgacggtcggcgtcaaaggcaaaggccgccgtaccggtgtggtagccgtcaatgtcctggtagttcagcacattgagcaggttatacgcatagacgtttttgtcgatgtgcaccgggatggcgttgaggggcagtgcaaactgcagcatcaggtcccgcccggccgagaccgggcctgccttgctgatctggtccacgctggaaaacaccgccagcatgcccgcagtgctgccttcggtcacgccttcgatgaccagatcggcccgggcgatgccccactgaggcagggtcccgtcgccagtgcggatctgcaccgccaccggacgcttgccccgcagggtgccttcggggtcatcctcccccgtcagcatattgatgccgggttccggcgtgggggtcggctccggggtagccgtaggcgcgggggtgggggtgggcgtcgcggaaggcgtccccccaaaaaagctgcatcccgccagagtgattgccattgatgccgccagcacagcggccgggaatcgtttcatgccaaaatacctcgcttggttctgggccgggctccgtttcgaccggtttcgcacccgcccggaaaatgcaaaaagggaaatccgccatgggtcatgcggcccgtggcggttcccttttttgtgttcgtaatcagtcgacgtaatcgctgacggaaccggaagcgccttcgccggcttccaccgcttcctcgtcgacgacctgctcggtggtggctgcgtcgctcttgttcaggtcgtactcagccagggtaccggtctgcaggttgaccgcctcgtccacgtccacgatggtgacgtagctcttgccgatgttgacgggcagctgctcatcgctgcactggccgtcctcggtcaggtagtacaggcgcagggcctccagcggggtgcccttctgccagtagatcttctcgcacttgccgccgtagcagtagtagccgatgccaccgttgccgtactcgacatcctggatgtcatggctgtcgccgggataggctgcgaaatcggtgtacaggatgaccaggttggtgaaggccagctgctcatcatactcctcgtcgatggtatcccgccaggaaccgtcggtggagtaatactgctgcatcttgtaggtggtggtggactcatcgtacaggaagcgggtcttgtagctggcactgtgggtgatggcaacatactcgccgtcgctgacgatggggccgtacttgtcggagtaagcgctgtccgggctgttggtcaggtcacggacagggttctcgtcacggtaatccacaaagttgaagaaggtggagttgtaggtgcggttcatatccacatcgtttttctcgatgtattccttgatattttcgccgctggtatacatggtgtgctccagcgccaggccgttgccgtagctcaggccctgccagttgacacggtcgtaatcacggtagccgttggccgcatcggtgttgttgagcaggccgtactcgtagttcttggcgtactcggtcataaagacgctctcgccttcatggatatacagcgcctgccagggcaggatcagctggaagaactggtcacggccggagcggacgggtccgatctcctcaatgtcgttatagtccacgaacagaggcataaagcgggtgatgccgccttccaccttgatctcgaacagcatctccgccttggacaggccgcgctgggggcgggcaacggtgatgttgttgaccatgacgccggtgatgcgctggccctcggggtaatcctcacccttgggttcgccggtcagaacgttggcgttgtagggttccggagtgggggtgggctccacaacctgttccggctgggacgactgggattccggctgagaagtggtatcggtctttttgcacgcggcaaacagcatggcgcatgcagacaatgccgccacagtacaaaggattttacgcttcatggacagtcctctcttctttctggatacattttctaagcgccccgaacgccggaggcacctgtaaccgtgctgtcattatttcttttattctacttgctttaggctgatttgtaaagccgaaacggggatttttacaagcatttccaccgtgtaaggccgccgcgtacaggcaaaaggcctgttcacgttctttttctcttccccgccgtctgttttccccatttccctatggcggcagcggcccggcaggcgatcatggcaaggccgaaccagccgatcaccgggaacagcccgcccacaagggtctggaagggcagggccgaacacacccaccccgccagcgctgcccccgcggcggctttccggctgccgcccagccgttcgcacacgccgaacagcagcggtgcggcggtggtgtagacccccgccagcaataccggcagcgcggcccaggcagcccagggccacaggtccccagccagggccaccgccggagcagggctgccggtcacggcagggttggccgtcagccccccgtgcaaaaccagcagcgccgcaccgaacatcccgcaggccgtccacgcggtgcgccgggccgatgtccgctctgttacagtttgccccatggcctgcaaaaacggtaccagcaggtaaaaattgtaccctgcgtagaccagcgccgccatccaccaactgcgggccgggggacggatctgcaccgccgccccgggttgcggccctcggatcagggccgcggctcccgtcaccgccacaaagacggcgatccagggtcccagcctgcccagtacctctgtcatgcgggtcaggcccgccagcacggtggcaagggtggcggccagcatcagcgtccggcccacccagggcggcaggcccgcagcggtatggagcagcgcccccgcccccgagagcatcaccgcgtacaccccgaacaagaacaccggcgcagccccctgcagcagcgttcccgccgggcggccgcaccagcgcacaaacaccgggccttccggtgcatcccgcagcatccaggtacaggccgccgccaggaccagacaggcaaggcaggcccccgccgctccccgggccccgccgtaggccgtgaaaaactgcacgacctcctgaccgctggcaaagcccgccccgatcaggcaggccacgatcgcccctgccctgcctgccgcagtggtcttttgttccatggctgcgccccctgtctccccttttgcacagcctatgcggcggagggcggtcccatgccctggcagccgtggacgccgcaagggcaggcggcacaaaaaaggcggcccgccccgccgggggcagaccgcctttcagttatcgtttatgctttggggaaggtcacgcggatggtggtgccggtgcccacctggctcttgaggtcaatgcgggcgccatgaagcatggcgatgtgcttgacgatggccaggcccagaccggtgccgcccgtggctttgctgcggctcttgtccacgcggtagaagcgttcaaaaacgcgggcctgggcatcctgggggatgccgatgccgttatcctccacggccacataggggcagccgtcggcgtcgatgccgctgtacaggcagacatgaccgccgggacggttgtaccggatggcattgtcgcacaggttggtgacaagctcggacagcaggtcccgtccgcccatgagagaagcgggctccgccttgtactggagggtgacatacgccttgcgggcattcatggtcatattgacgcaggtatcccggacaatggaggcgagatccaccggctccggatcaaaggttttctcattgcggtcgcgcatgccgtccagctcggacagctggatgatgtcggtgaccagcgtgatcatacggctggcttccttgtggatgcgctgggcaaacatcggcacatcctcgctcttggccatgccgttttccatcagctcagcgtaacccgaaatgctggtgaggggggtcttgagctcgtggctgacgttggcggtgaattcccggcggatagcctcgttatcctcccgcagcttgcggtcggactgcaccgtgtgggccaggagggacagttcctcgtaggggacttccgcctcgatggtgtccaggtgctccgccatatggatgatgggccggaccagcgcccgggtgagcagccatgccagcagcgctcccagggccagcaccagcaccacgcccaaaatcagaaagggcaggacgcggttataggccgaccacaggtcgccggtctcatccgccaggcgcagcacgttgccgtccgaaagaaggatggcatagtagtgggtctcgtaccccagcgtcttgctgtggcgggtgtccgcgccggagccgctttccagagcctgacgcacctcgggacggtcgagatggttttccatgtccgccgttccggtgctgtcgtacagcacgttgccttccggatcaatgagggtcagacgcagggagtccccctcgtccaggtagccgtccagagaatccccctgccctgcctcatatccggcggcgatggctgccgccgtgcgctgcaggtcccggtccagctggtggccgaaagcccgctggaacagcaccgccgttcccagcgcggtcagcgtgacacagatcacgcccaccagaacaatggcgcggcggatgcgcttggccatgctctcaggttgtttcatcgccggcctccgcgtcgcggctggacagcttataacccaccttgcgtaccgtgcggatcacgtcgcccgcgtcgcccagtttctggcgcagcgtacgcacgtgcatgtcgatggtgcgcgattccagcaggtcgtcggtatcccagaccgccttcatgatgcgctcacgggcaaggacctcgcccggatgttcgagaaaataatgcagcagagagtattccttgaaggtcagctccaccgggacccctgccgaggtcacggtgcgggacagatcgttcatgacgatctgctcaaagcgcagcacccctgccgccgacggtgcatccgccgccgcacggcgcagcaccgccttgacgcggctgatgaactccagcacgccgaagggtttgctgatatagtcgtcggcgccgtggtccagtccgcgcaccacgtcgatctcgctggtcttggcggtcaccatgatgaccgggatggtacgggtggccgcatcttcccgcaggcgggacaaaatggcgtagccgtcctcgtcgggcagcatgacgtccaggatcaccagttccggcaggcgggtgtggaccgcgttccagaaacttttgccgtcctcaaagccctgcacctcaaaatcattggtctgcagggcgtactgttccagctcccgtatgctggcatcgtcctccacaatataaatcattcccgatttcccccttcctgcggactgcacggggaaagtcagtccgcagtgtttttggcggccgcacccgtcgggacggaagcagcttcctccgggaaggtgtaacggtcgcggtagcgctcatagcgatgctcaaatttctcgctggcgccgctcttgacataattcagatactcgtgcgtatcgaacttgtcctccgccacctcgatcatggcgaccgcgatgttggagcaatggtcggcgatacgctcgtagttggtcagcaggtcatccagcacaaagccgtactcgatggtgcagacacccgcctgcaggcgggcaatgtgacgggtcttgacctcgcgcacaaggccgtccaccacctgctccagcggctcaatcttggccgcggcatagcagtcgcctttctggaaatcgtccaccgtgcggttgacgatatcctgcacggcggcctccagaacgttcaggtcctcgatggcttcgttgctgaagtgcacgttcttgtcacggatctcctgggcggtcttgatcaggttgaccgagtggtcggagatgcgctcaaagtcaccgatggtatgcagcagtgtgttgatggcacggttgtcctcccgggagagagccttgcccgacagcttgaccaggtaggtgcccagaacgtcctcgtaatggtcgacggcttcctccttgcgcaggacctcgtcggcaatggcgtcgttccattcacgggtggtggacatggcctgcagcagagcggtacggcagatctccgccatatcgccgccggtcaggacggcgcggcccacagccacggaaggcgtggagagcagacgctcgtccagcaaagtggtctgctcgggcttggcatccttgccgtcggggacggtgaggatggccaggcgttccagaacacggttgaagggcagcagcgccatggtggtgaccacgttgaaggtggtgtgaatgaccgcaatgccgaaggtggtagccgtctcatgatagaacgggaactggaacacggcattgagcaggtagaagccggtcaggaagatcacggtgccgataacgttgaaatacaggtgcacaaaggcggtgcggcgggcatttttgttggcgcccgccgaggcgatcatggccgtgacggtggtaccgatgttctggcccatgatgatgggcagggccgcgctgtaagacactgcgcccgtcatgcacagcgcctgcaggatacccaccgacgcagagctggactggatgacagcggtcagcagcgcgccgaccagcacgcccagcaccgggttggagaaggcgaggaagaggtcggcgaaccagggctcgtcggccaaaggcgccatggagccggacatcaggtccatgccggtcatcagaacggcaaagcccaggaagatggtgccgatggactttttgcgctcatggccgaaggtgtacatggccacgcccacaaagcccaggatgggcgcccaagcgtcggggctgagcatctggatcaggaaactgtcaccctgcaggccggtcagagagagcagccaggaggtgacggtggtgccgatgttcgcgcccataatgacgccgatcgcctggtgcagctgcatcaggccggagttgacgaagccgaccgccataacggtggtggcgctggacgactgaatgacagccgtcacgaccatgcccagcagcaggccgcgcacaggggacgcggtcattttgctcaggatgccctgaagcttaccgcctgcgatctgttcgagggatttgcccatgacgtccatgccgtacaaaaacaaggcaaggccgcccagcagtgtaaagacgttgaacacgctcatacctgggtacacttccattctctcttattttccaattttcgacgccgccgtgcggcgatgtgcggcagaaaaaccgcaagataccgttatctattataatggatgcccacaccgcgcggacaccaaaacgcagtaaagtatttgtaaaatctatgtaaagtggccggctttcgcatattttttgccttcatttttcgtcttgcgcgctttttttgcgccgcagccggactgccggaggacttgaaacatgcaaaagatcccggcagccgtcattttcagggtggttcctgtgttccccggtgcctgaaacaaatcataaaaagtcgcttttgccctgcggcgccgtcccgatcgagcagctctcccaaaagcaaaactccgccccgcggacggtcccccgtctctgcggtgcggagtgttttgtgaaggcacatcagccgtagggggcttcctcccgccagcgggcaaggcgctccaccgtctcgtcgtcctccacccagccttcttgttcgctggggcgggcattgggggcgtagctctgctgcacccccggcacctggcctttcaggtaggctttcgccgccgactggcgggaaggcaccgtccggtgaagataccgtcccccggtactgttttcactttgcagcggcggattctgcccgccatggtcaccgggtcttttcattgcgcatccctccctttgggttcagtgtgcgcagggacggcggcattataccaaaatccgcccaaatgtgatatactgtaaaacacgcctgccgggcggacccggctgccgccaaaggagaactgcatcatggaactgaacatcaaacgtgtcatctatcatattctggacaccggcgcttccgagccgctgctgtctgaccgggagaccgatctggacgccgacctgaccgaatatttcatgtcctgcctggaaaaggcctttgccgccgacgacggccgcatgtgtgagtttttgcccgactccgcctttgcccaggagctttcctccaatcaggacttcatcgacctgtcccgccgcattgccggcgtgatctttgagcagatgctgcaatacccttccatccccgcgggcgacctggcggtggtggatttcagcgtgggcggcgtgccctatctgggcgtgctcaagctcaactaccgccccggctacacccaccagacccgcaccctgggcaatgcccagtattccggcatgacgccccagcgcaccctgctgcccggcaaccccaaagccgacgaggccgccctcattgatctggccggtatgcgcatccgcctaatcgaaaagcgttatgacatggacggcaaaaaggacagctacctgtccggccgggtgttcggctgcgcccaggccatgccggaaaaggccaagctcaaagccgtctgtgagacggcagccgccgccgtgcgggaagcctaccccgagccggagagcctggacgatgtaccgccctttgacggcggcaccgagacggcggtggacctgatggtctgcaaccaggcagtggacaacaccatcgcggtagaggacgtccgcgcccggatgcgggaatgctatcccctggccgcgcccaaatttgagcaggctttggccgagaccggcgtggccgaggacgaccacgtcaccgtctcccccgcccggatgcgcaaaatgtccagccgcagcttccgcaccgagagcggcatcgagatcaagattcccgcggaactgtgcagcagcgacgaggcagtggagttcatccacaccgccaccggcggactgtccctgctcatcaaggacgttctggtctgaggtctttcaaaagcacagcggcctaatcaacacaacaaagaaaaaccggtccggcagattgccggaccggttttgtgtttgtaagagaccgatcacatcatcaggcgctgatcggcggtcagattgagttcgtcctcgttggaggaatcctcggcgctcaccttgaccatcagggtgccgcgggcggagttgccgtcgcggtccatggctgtgatgttgatgaggaagctgtcgatgcccagctccaccgactcggcgtcgatgtggacggtgtaggtatcgttctcacccagctcgcccagcatgctctgtgcgaactgctcgccgtcggcccaggccgagtaggtgaccatggtgacctgatcgtccgggtccttggcggtggactcaatgtcaaagccctgttcggtcaggttgatggcgttgatgttggacagggtgggcaccgtgccggaatagctggccagagtggtctcgccgctggaaaccagcatcgtctttttgatgttgaggcgtccgccgaaatcgtcatcggccgtcagcaggaaggtatactggccggcaggcagcgtctcgaaggagagctgatccaccagaccggacaggtcataggtgggagaatcgggctggaccgtggcgctctggaccaccgtgccgctgtcggtcatgacggtcaggttgacgcgggtgatgttgcccggcgaggtgatggtacccgagggagtgaaactgtcgccggtatgcagccgggacggataggacgccgccgtggcggtcagggccgggccaaggccactggagcggttgatgtcgctggccacaaaccagtaggatgcggcattggagatggaaatggttgccgaggacaccgggatgcgtccggagggagctgccgtggaggggtcggagcagtagaacactccgccggtgtaatcggtgaccagaatggcgtggggtacgctgcggttgtagacgacgatgccttcgggatgctctttcagcagcgagatgagctgattttcaacgctctcatcctcgtcaaagtaggcgtgctggacctcgatgcccagcatggagaagtcgtgagagagtcccacatagctccacgccacgcggcgcaggctggactcggtgatggaatcccagttatcaagaccatctaagtaagcacggcggcgcatcatcatggccgccgacgccagcgtgcaggtggaacttgtctgctgctttgcgtaaaattcagtgatcgaacgcaggtcttcagcaaaggtggccggtactgcggcaaacatcaggcacagggccagaaacaatgcaagcagtcgtttgtgcatgggcggcggtacttcctttcttaagaactgttgctgtgcggccagactgccgcttccaaatatcttcaagtcaacgtagtttatagtttacaacttatttacagtgctgtcaattcgacagactgccgttttccgcggccaaattttggtgtccggccaacatcttgcggcggaccgaccattttcccacaccatgcgcaccggcatagcggggcaaatttcacatttgtatcccggcagagcctgtcctccccccgccccgcagcaacggacgccgcagcccctgttctgcgggagccgcggcgtccgcctcatctgcaccgacaggcagatattgtcatggaaacgtcatttttttcgtcagttccgcctcacagcccgaaaaggtcgttccaggtcttgcggccgatcacaccgtcgtcgggcaggccctcaacggtctggtaggcgcgcaccgcctccctggtcttttccccgaactcgccgtccgccttgagcgaggtcaccaacgcctgcagcttctgctgggcgctcttgacggtggcaccgctctgccccatgcggagggggatgcccggatagacgttgtccggcatggattgtccggcagcggcctggtacagtccgtcccaggtctcctgccccacctcgccgtcgctgtggagccccgccaccatctggaaggtcttgaccgccatggcggtggcgctgccgtagcggccgtccaccgtcaccgggcggatggccgtccagcggcggcgggcgctgttgagccaggtctggaccagggccacatccggtccccgggaaccgctgcgtaaaagtttgccccaatacggaggctgcgctgtgctgggcatgaaaagtcagctcctttccccatataaaagatggcacggcagcggcccggtacgggtccgccgccgtgccattccagcacagtctatgcgcaaagggtccttactgatacagggggaagcgctccaccaggtcggccacacgggcggcgacctcgtccttcttgccctcaaagtcaaagatgcagtcggcgatgcagtcggcaatgaccttcatctcgtcggggcccatgccgcgggtggtcacggcgggggtgcccacgcggacgccgctggtgacaaaggggctgcgcttctcgccggggacggtgttcttgttggcggtgatgtgcacttcgtccagattgtgctccagttccttgccggtgcagtcaacatcggacaggtcgatgagcatcaggtggttgtcggtgccgccggaaaccagcttgacgccccgggcgttcagcgcctcggccagagcctgggcgttttccacaatgcggcgggcgtagtctttgaactccggcttgagggcctcgccgaagcagacggccttggcggcaatgatgtgctccagcgggccgccctgggtgccggggaagatggcggagttgatgcgcttgatcaggtactcgttgttggtcaggatcaggccgccccggggtccgcgcagcgtcttgtgggtagtggtggtgaccacgtcggcgtagggcaccgggttctggtgctggccgcccgccaccagaccggcgatgtgggccatatccaccatgagcatggcgccgtagccgtgggcgatctctgccaggcgggcaaagtcgatggcgcggggataggcggaggcgcccgccaccagcagcttgggacggaccttgttgacctgcttggccagggcgtcataatcgatgtagccgttctcgtccacgccgtaggcaacaaagttatagttcttgccgctcatgttgacgggagagccgtgggtcaggtggccgccctgggacaggtccatgcccatgacggtatcgcccacgttgagcagggcaaagtagacagccaggttggcctgggcgcccgaatggggctgaacgttggcgtacttggcgccgaacagctcacaggcacgggcgatggcgatgttctccacctcgtccacatagctgcagccgccgtaatagcggtgtccggggtagccctcggcatacttgttggtcaaaacgctgcccatggccgccatgaccgccggggagacaatgttctcgctggcgatcagctcgatgttctggcgctggcgggccagctcacggtccatggccgccgcgacctcggggtcgctgtggctgacaaagccgatggtgtccatcatgtcctgatacatactttcgacgctcctctcatgtgggggataaaaattcaaaagcggggcctcgccccgcggggaaacaaccgatttacagcacgcccttggtggaaagcaccccctggatgcgggagtcggggctggtggcggcgtccagcgccttggcaaaggccttgaacatggcctccagtttgtggtggtcgttggcgccgtacagtaccttgatatgcaggttcatggcggcggaatagctcaccgcgtaaaagaactcccgggtcatctgggtatccataccgccgcaggcgggggtgtcaaaggcggcgtcgtatacaaagtagggacgcccgcccaggtccaccgcgcacagcgccagagtctcgtccatgggcagaaggctgctgccgtagcgggcaatgcccgccttgtcgcccagggcctgccgcagcgccgtgcccagcacgatgcccacatcctcgatggtgtggtggcagtccacctccaggtcccccttgcagtgcagggtcaggtcaaacaggccatggcgcgcaaagccgttgagcatatggtcgaaaaagccgatgccggtctggatatcggtcttgccggagccgtccagctccagcgtcatggtgatgtcggtctcccgcgttttgcgcgtgacggtggctttgcgtgacatgtcagtcccctttccggcgcaccggaatccccgggccgccatagaaatgtacggtttaactataccaccccaaaacccttggcgtcaaccgcgctttgccccttcgtttttgccgtaacagctgcaaaaagcggccttttgcggatgaatggccccgggcggcggacagggaggttccgacacggatttttccaatagagtttacgaattcgcaacaacttttgtttccgtgcgcggtacaatatttgatgcaaaggtaaaaaaatctttgctgcgcgccccggcataagcgcgggcgcgttttcctgtttgaaaggacatgcaggtatgagcaaaatcatcggaatcgacctgggcacaacaaacagctgtgtcgcggtcattgagggcggcaagcccgtggtcatccccaacgcggaaggtcagcgcaccacaccgtcggtagtggcatttgccaaaaacggcgagcgtctggtgggtgaacctgccaagcgtcaggcggtgaccaatgcctgccggaccctgagcagcgtcaagcgcaatatgggcgaggatacccgctttaccattgacgggcggccctattccccgcaggagatcagcgccctgatcctgcaaaagctcaaaaccgacgccgaagcctacctgggcgaacccgtcaccgaggccgtcatcaccgtgccggcctacttcaatgacgcccagcgccaggccaccaaggacgccggccgcattgccgggctggaagtccgccgcatcatcaacgagcccaccgccgccgcgctggcctacggcctggacaacggccgcacccagaaggtcatggtctacgacctgggcggcggcacctttgacgtatcgctgatccagatcggcgacggcgtggtacaggtccttgccacctgcggcgacaaccatctgggcggcgacgactttgacgagcgtgtcgtctgctggctggtggaacagttccgcaccgcccacggggtggatctttcctgcgataccgtggccatgcagcgcattcgcgaggaagcggaaaaagccaagaaggagctttccagcgccaccgtcaccgagatcaatctgcccttcatcaccaccgggccgcaggggccgctgcatttgcaggagaccctgacccgggccaaatttgacgaacttaccgccgatctggtggaacgcaccgccatgccggtgaaaaacgccctgtgcgatgccggtctggccgccaacgacctggaccaggtgctgctggtgggcggttccacccgcatccccgccgtgcaggccaaggtcatgcggatgatcgatctggaaccctccaagaccctcaaccccgacgaatgcgtcgctttgggtgctgcggtccaggcgggccgtctgggcggcgagatgctgtccggcgggcaggatctgctgctgttggacgtgacccccctgaccctgtccatcgagacggtgggcggcgtggccacccatctgatcgagcgcaactccgccattcccacccggttctccaagatctttactaccgccgcccccttccagagcacggttgagatcaaagtgctccagggcgagcgggaatttgcccgggacaacaagctgctgggcaacttcaccctgcggggcatcaagcgcgcctgggcaggcgtgccccagatcgaagtcacctttgacatcgacgccaacggcatcgtcaaggtcagcgcccgggatctggacaccggcaaggaacagagcatcaccatctccggcagctccaacctcagcgaggaggagatccgccgggccatgcacgatgccgccatgtatgccggtcaggacaaggcccgcaagtccgccattgaggccctgaacgccggcgagtccgccgtctaccgggtgaacagtgctctgggttccaaggcgggcaaggccctggaccgggacgccaaaaaccgcatcaaggatgccgagcgccagctggaacgtgccatgaagcacaaaaagcccgaaaaaatgacccccgacgatactgcgcagatcaacgccgcgcgggaatcgctggaagccgtggcggcggagctgctctccgtgtgggaagcccagcagagcgcccagccgcagaaataacttttttccccttatgacgctgtacgacccgtgctctgtccgccatgaccggcggcgtgggcacgggtccttcgcgagcctgccgttctccctgacggcgggcattttctgccccggccaaccccgggtcggccgcaccatcccgggccgtcaccctgccggacggccctgtttcctttttcgccctcctgcaaagccgttccctgcggcggagggcgaagcgcgttctttgttttgtggaggtaatcgttatgtcccaactgcccaaaaattccgttctgctgctggagggcggcgccttccggggctgctacaccagcggcgcactggatgtctttatggagaatgacctgtattttcccaccgtggccgccgtatccgccggcgggctgaacgccgtcaactatctgtcccgccagcccggccgcagcgcccgcatcaatctgtgctaccgccacgacccgcgctacgtggggcctctggctctgctgcgcagccggggcgtggtggggttcaactacctgttcgacaacctggccgagcgggagtcctttgactatgacaccttcaacgccagctcccagaggctgtttgcggtggccaccaacgtcaacaccggcaaggccgagttctttgaaaagggcaactgctccgactttacccgggcggtcattgcctccgcctccatgccgctgtgcagctggccggtgaagatcgacggcaaaccctatctggacggcggctgctcctgccccatccccctggactgggcgctggaacagggctttgagcacattgtcgtcatcgccacccggcaaaaaggcttccgcaaaccggccacctcccagcggatggtggacctgtacagcgacttttacgccaaccatccccgcttttttgcctcgctgctgaccatggacctgcgctacaacgacttgatggaccgcatggaccggctggaggaggaaggccgcatctttgtgctgcgccccggccgtcccgtggatgtgggccgctttgagggcgacaccaaaaagctgctggccctcatcaacgaaggccgggaggacgcccgggccgcactgcccgccctccgggagtacctggcggcaaaccactgagtcatcatgccctgcgggcatggcaggacggtcaaaacaggcattttacattgttatgaggcaggtctacaatacaggtagaacaaccaccaacgcaaggaggcctgcaccatggcaaacaagatcgagcatgaagtctttccccgcggcggggaaaacaccgcttttgcacagtattttatcggaaaatcctggctgaatatgctcaccacccagggcgtgagcatcggcaacgtgacttttgaaccgggctgccggaacaactggcacattcaccacgccaagagcggcggcgggcagatcctgctggtcaccggcgggcgcggctggtatcaggaatggggccagcctgcccgggaactgcacaccggcgacgtggtggtgatccctgccggggtcaagcactggcacggcgccgcccgggacagctggttcgttcacctggccgtggaagtccccggcgaggagacccgcaacgagtggctggagcctgtaaacgacgagcagtacggcgtgctggactaaacccggaggttccccccttcccccgcaaaccggataaaagtaccgcatcaaggcgggaccgacccaaaccgtcggccccgtctttttcttttgccgcccgtcctgccaaggcagaagaatcctacgatgtaaaatattttgccgggagaaaaccggcagaaccccacgcccggcatcaggtttcacaaaagttttacgtccttctgcagcaggttgcccaaactcccgggagagacgtttcatcccctgcaaaggccgccgccatgcgggctttgcaggattgccccctttctccatgttcccgccgggccgtggcgcagcgtcaaatctcacggtattccggcaatttttgtcaaggcggggccggtgaaaaattcctgtcggagcaggccgcccgcgttgcggttttcggcaaaagcgtatataataggataaatactgccatacgcagaggggaggcatgggcttgcagcaacagcagcgttgttcgggcgggatcacctttaccctgacgcgccgccgggtgaaaaacctgaacctgcgggtacgtgccgacggcagtgtggccgtcagtgcaccgtccgccatgccgctgcgggagatcgacgcctttgtggcgtcccgggctgcatgggtgacccatgcccaggaaaagtttgcccgccgccgcgccgcggaggctgccgtaccgctgcccaaccgggaggaagcccttgccgggatgcaggctttgtgccgtgcctggtggccgtattttgaaggccggtgtcccggccccatgcccgctgtgcgggtgcgtgacatgcatacccgctggggcagctgcagcctgcggacccgcaccgtctgctttgccctgcggctgtggaccatgccccctgccgcgcgggagtacgtagcggtccatgaactgtgccatctgctgcatccggaccattcccccgccttctgggcggaggtcgcccgcctgctgccggattacgccgcgcggcgcgcactgctgcgcaccggagagacccgatagggagggaacgttttgcccgacaacaaacgatattccacgctgatgaacaacaccatcctgtttgccatcagcaatttcagttccaagctgctcagcctgatcagccagccgtatctcagctacgtgctggacggccccgaagtcatgggcgtcaccaagctgatgcagcaggtagccaatctgctgatcccggtggtcagtctgggcgtcagctatgccatcatccgcttcggcctggacaaaacacaggataaatcctcggtgtttgtcaacggcctggccaccatcgccctgggctttgcaggcatgctgctgtgctggcccctggttgccatgatccccaatgccggggaatatatggcgctgctttacctctgcgtgttgatgagctgcctgcgtaccctgtgtacccagttcatccgggccaggatgctcaaccgtctggtcgccatagacggcgtattgaccatggccgagctgctgggcgggtacgtgctgtttttgaacatcatggatctgggtgccgtgggctacctgctggccatggcactgagtgacgccctgtccaccgtgttcgtctttatcgcgggcgggtgcgccaaatacctggatttccgcaagttcagcgcaaagctgtggaagtccatgctgcggtactgcgttcccatgatcccggcgtccatcagtttctgggtcatcaatgcctccgacatgttctttgtccagtatatgtgcgacggcatggacggccgctccggcaatgcctgggccggactattgtccaccggctactacctgccccagatcctgaccatcgtgggccagatcttctacgaggcctggcagctttccgccgtcagcgaggaaaccgaccgtcaggcgttcttctcccgggtgttccgggtctacgccagcgtgctgttctgctgcgcggcgggcattatctggctctgccgccccctgatgctggtgttccagcaaagctacttcgacgcctggcagtttgtgccgttcctggtgctcagctccatgtgcacctgtctgaaccagttcaccaacagcgtctatgtagtgttcaagcgctcggtcagctccctgtacaccatgctggcgggcgcggtgctcaacgtgatcctgaacttcttcttcatccagatgatcggccccgtgggcgcggccctggccagcttcctgtccctcttcctcgtgttccttctgcgtgcctactccacccgcggcctgctggaaattgacttccgccccgcctggatgggcctgaacctggccatcgtccttgcggagaccgccctgctctacctcttccccgagcagtccttctggctgtgtatcatccccaccgccgcggtcatcgccatcaacttccgcgatgtctggcagatgttcatgatggtggttggccgctttatcccgcggctggccaaaggccgcaagtgatttgcctgcccctggcacggtcttataagaaggcagggctgcaaagatccgactgccgcacggcagatgccccgtgacccggtattgccttccgtcatgccctgacctgtcccctaaaacaaaaccccgtcccggatgccctgcatcttgcagagccgcccggaacggggttttttgatggtgatttttcccggcagggagattttatcaccgtcgcaatatacaatttgtattatttcgatatacaatacagtttatgggcattattcagcgggaatcgccggggattcagatcagataaaatccccagcttggcagccagagggtactggccgcccaccaggtgggtaccggcaggcccgacagcaccgggtagaaccagacaaacagcactgctgatgccgcgcacagcccgatggccagacgcttggcggcgcgctggtttttcatgtcggccaggaccacggcaatggccgccaggcagaacatggaactggggaagtagtgatacaggaaagtgcaccgtgccacgaatacccagggaaccagctgcgccgcatacaaaatcagcacacccgcgccgcgccggctgccccggccggagagctgccgccaggcaagggtgaggatgctgaccagccctgccagccagagcaccggtccgcccatgcccgcaatgctgccccgcatgttgtcgggcagggaggcgttctggtaataccacaccgggcgcaggtccagcagccaggtataccagcggctttcaaagggatgggtggcgttgagggtggagtggtactcatacatatagacctggcagttccaccagtccccgacgccaaagcccgggtcccgccagcagtagggcaggtaggcccccaggtagatcacaaagggcagcagcacatagaacagcaccccgccccaggccgcggtgacgaattcctgacggaagccttcccggttacggcgccagcggacatacagcacgccgaagtaaaggatggccagtcccacgcccgcataaatgccggtccatttggccgcacagccgcagccgaaggccacaccgcccagggccatgggcagcaatgccttgtcgatgcccttttgcagggcggtctgggcgtaccacaccatgcagtgcgcccccagcaggataaagaaggtcccgtaaatatcgatggtggcaatgcggctctgggaaaagcgcatgaaatccagcgccagaatgcaggctgccgcggcggccacccagggtttgcgggtcaggcggcggataaagcaccaggccagcggcaccagcaggacaccgaacagagtgcctgcaaaccgccatccgaaaccggtcatgccgaaaatggcaatgcccagcatgatgagatccttgcccagaggcgggtgcgtcgtctcatagacggtcatgccgtggagcatctcgtacccggtgcggccgtggtagatctcgtcaaaatacatgctgttgagctggctgatggtatcggggacggcatcctgctcgtcaaacagcccttccccgccggacaccggcagggtgctgccgtcggcagcccgcagggacagctcgaacacctgtcccccggtcagctccgccgtccagtgggtgccggaggacgcaggcagcgacacgctctgccaggtgaacaccgagcccagcgtctcactgtacacaacggtacctgactcgtcggtgatggtcagcgttgaccccgagtgcaccccgggatagatccaaagggttgccggttccaggtcggagtcgatggtgaattccaccgtccgggcgccgtcctgcgcttccagagggttctggggcgcggtcatctcgcccagataggcaaagctgaccaccgccgtagccaacgtcagcaggcccagccccagcaattcccgccgtgtccagacgggctggaccgcggcgccggggcgggcattgccggtccccagctggcgagatgcacggcggcgggcttttgccaagggcaaggtctcgccgtggacaacgatgtcgtacaccgccgccagcagcagcacacagcaggcggtggcggccaggctgacaatgcgggtcagcagcacgctggtggcagaagtcaaccatgcgtcgtccgtctcattctgagagtagaccgccgacaggttgatcagcccggtcagggtcaggcccgcccccgcgcccagcaggcgtcggtcattccagcgggcagccgccagcagggtcagcagcacccccggcaccagatagcgctcgtgcatattctgggcaaagatgaagatgcccaccaaataggccgcggccagcaaaaccggagaaaaccgctgagtgcgcattccgatgaccgcggcagcaaccagtgccgccgtgagcagcacgatataggcgatgcccagcatctcccaggtgacagggccgatgaccgacccgtcctgggagacccagttgccgcccagggccgcaaaccagttgaaggcgttgaccgtggcatagggatagctgcccgccgtgccaaagtatttttccagcagggagggcaccagatccgcaatgccgaaaaaggggatgccggccagcagcggcggcacaagggccagcaccgccgacagcagggtcctgcccactgcccgcaggcgctgctgcatgccgctttcctgggcgatgcccaccagaaagcagaccgccagcaccggcccggcaatcagggcctggggtttgatggccagagctacgccatacaaaagggcgctttgcagccagcggcgctcctccagcaggacaaagcaggcaatgagcggcaggctgaaggctccatccacctgtttccacaccgcagtgtcaaacagcagcagcgggctgaaggccgcaaatgccgtcaggcggcggcaggcggcggggtctttcagatgccggcaggcggtctgccagatcagggccgcacagccgcagtcgcacagggcggggatgaatgccagcatcatccgtcccaccgcaccgtcccaggcaacgcccagggcgccacgcaccgccgccaccagccacagcacatacatgtaaccgggcggatagtcggcaaaatatccctcgctgtaaaaagcgccggggccctgggatgccagcttgtcaccccaggcggcaaagcagcccacgtcgtaggcatagccttcggtggccgcagccatgagcaggcgcaaaatcagcgcagccaggagcaggagatacaatcccctgctccggtttctgcgggtggtggcggtttcgggcatgagccgccctcctttcggtagtgtgtctgccgtgaaaatgttccttctcgcacaaaagcggcaaccgcccggcggaccgggccaaaccccggtaggggtaggtcccgccgcagggcagctgccgctttgtgtatcgcgggcggtccgccatggggcgtccgctcggtatcaacggtttgtcgcaaaccgttccttttgtatctcaccggagggatgccttcccgtccggttctgtccgtttatgccaatgccgtcagcaaccggatcacaggcgttccaccttgggcccctgggcggtatcggtgacagcccagcccatctcggtcagctgggcgcggatggcgtcggcgcggccccagtccttggctttcttggcggcggcgcgctcctccaccagtgccatgacgtcggcgggcacgtcgctcttcttgcggttgtagagcaggcccagcacgccggtcagctcgtcaaagactgccgcagcctgttccagcgcagcgcgggaggcgctgtcggacagggtgttgatttccttgacaaattcgaagatggccgccagagcgtcgggggtgttcaggtcgtcgtccatggcggtgatgaacttctgctttgcctgctccgccttggccaccagctcgtcgctgtcgccatgggcgtgctggatggcaaagtccaggttatcccggcaggtgtacaggcgctccagggagttcttgcagctctcgatcagctcaacggtatagttgaggggcatgcggtagcccgccgtcagcatgaagtagcggatgggctcgtagccgtacttgtccgcgatctcccgcacggtgaagaagttgttggcgctcttggacatcttctggttgttgatgttcaagaagccgttgtgcatccagtagcggctgaaggtgcagccgttggcgcactccgactgggcgatctcgttctcatgatgggggaagatcaggtcctggccgccgcagtgcaggtcgatggtattgcccagatgcttgcgggccatggcgctgcactcgatatgccaaccgggacggccatggccccaggggctttcccagtagggttcgccgggcttggcagccttccacaccgcgaaatcggcggggtcttccttgaggtcgtcgtccatctggctgcgcagagcgcggttgccgctctccaggtcatccaggttgaggtggctcagcttgccgtagccggggtcggacttgacgcggaaataaacgtcgccgttgcgggccgcataggcgtgaccggaggccaccaggtccttgacgatcttgatgatctcgccgatatgctcggtggcgcggggacggacggtgggttccaggacgttcaggccctcggaatccttgatgtactccgcctcgaacttgcgggccacctcctgcatggaggtcccctcctgctggcctttggcgatgagcttgtcgtcaatatcggtgatgttggagacatagtacaccttgttgccccggtactccaggtagcggcgcagggtgtcaaagacgatcatggggcgggcgttgccaatgtggatgtagttgtacaccgtggggccgcagacatagatgcggtattcgccgggcacggcggggacgaactcttccttctggcgggtcatggtattgaaaatctgcatggcggaacttccttcctgtttcgcagcgttatgcgatgaacacttgtattatacccgcatggcgggcggcttgcaacaaaattacttcgcctgcatgaaacagctgcggttctgccacaggtagatgccgccggacagcaccgtgaccgccgccaccagccagcacagcgcctgggtgatgatgccgaaagccatgatgtcggtggagtccatgaagaagggcgcaatgtagtagtagatgatggtgagcatctgcaaaaccgtcttgaccttgccccacatgttggcggcaatgacggtgccggactcggcggcgatcatgcggacgcctgccacggcgaactcacggaacatgatgatggccagaaccacggggtggcacaggccgtccactaccatgtagatgaaagcggcggtggtcagcatcttgtcggccagagggtccatgaacttgccgaagtcggtgaccagattgtttttgcgggccaggtagccgtccaggaaatcggtgaagctggcaacggcaaagatgatgccggccaccagctgggcggtgggattgtactcggcggtgccgatgcggccaaaggcggcgaataccataaagacaggcaccaggatcacgcgcagcagcgtcagtttattgggcaggttcattgtttattcctccaccttgttttccacataaccgtacaggtcataggtatcgctgtcggttacggtcacattgtaaaagacgccggtctccagcggaacgtcgccgggggtcagcacacagccgtcgatctcgggacagtcgcccttggagcgcagcaggtacatgccgctctcctcgtcgatgccgtcgcagacacattccagcgtctggcccacccgatcggcctgcttgcaggcactgatttccgcctggatctccatgatatggtcggcgcggcgctgcttggtctcctcgtccagctggttttccatgcgggcggccacggtgttctcctcgggggagtaggcaaagcagcccagacggtcaaactccaccgtgcgtacaaagtcgcacagctcggcgtactgttcctcggtctcgccggggaagcccgcgatcagggtggtgcgcagggtcaggttggggatggccgcccgcagccgggcgatggcgtcctcgatctctctgcggccgccccggcggttcatgccccgcaaaatttcatcgttgcagtgctggatgggcaggtccagataaggcaccaccttctcgttgcgctgcatggcggcaatgaattcgtcggtgatgcgctcagggtatgcatacagcacccggatccagcgcaggccctggatggcgttgagccggtccagcagttcgcacaccgcgccgggcttgccccagtcctcgccgtaggcggtggggtcctgggccaccacgatgagctcccggacgccctcccctgccagccattcggcctcggcgacgcagtcctccagaggacggctgcgcagcgggccgcggatcagggggatggcgcagtaatggcagcggttgttgcagccctcggcgatttttaagtaggcataatgccgcggggtggaaatgacccggcggccgcccaagggcatatcggccttggggccgtagctttcgatctggtcggcgccgtcggcacagacccggcgcagaatttccggcagggccttattggagccgatgcccaccacggcatccacctcgggcatctcccgggcgatctcgcccttgtagcgctcggccaggcagccggtgacgatgaccttcagctcggggttctgctgcttgtagccgcaggccagcagaatgttctcgatggcttcctccttggcggactggataaagccgcaggtgttgacgatgatggcgtccgcctcggcggggtcggccaccgtctcgtggccgtcggccagcagggcgtggcagaaaacgtcggcgtccacctggtttttggggcagccgagggatacaatggcgattttcatgggcagtttcctatctttcggtcgtttacggtcgtatcaaaaaaggtcagggcaggtcggaaaagtcgtcctcccctgcatcgtttgcttccagggcggtgcggatgacggtgtaggagaatccccgccgggccagggccgccatgacctgagggcgcttgccctcggccagcttgcgggcgtactggcgctgcaccagagcgcaggcggcggcgacctcggggtcggggccgtcctcgggggcatagagttcctccagcacctgagcggcagtgtcccggtcgatgcccttggcggcaaggtcctgttccacttcccggcggctcttgcgcttgcgcatgagctcggcggcacggcggcgggcaaagtcggcgtcgttcagcaggcccagttcctccgccttggccacggcagccgcggcgctgtgggggtcaaacttgcggcagagtttctggtacagctcccccgccgcgtggtcacgcagggccagaatatccagtgcccggtccaccgccttgcgggtgtcgctccggcggcggagttcctccagccggaaggattcgatctcgtcctcctcatgcaggtcggcgtcggcaaaggtctcggggtccagggaaaaggcaaactccccgtccacaaacagggccagacgcccccgtttggtctccttgacggcggtgatctggggcatcagtcatccaccatgatgtccaggtccacctcgctgcccgtggtcttgggggcggcgggggtctcggcggcaggctccgccggggtcacgggcttgaccacctcgatgggtttgacggtgcctttcttgccggcggccagcaggcggtcggcgttgtcgcgcaccagcttctcgatctcgtcggcggtctcgggatgctctttcaggtaggtcttggcgttgtcacggccctggcccaggcggatgtcgccgtagttgaaccaggcgccgctcttctgcacgatgcccagcttgacgcccaggtcgatgagctcgccgatcttggaaatgccctcgccgaacatgatgtcgaactcggcctccttgaagggcggagccaccttgttcttgacgatcttggcgcgggtgcggttgccgatgaagttgccgttggagtccttgaggccctcgatacggcggacgtcgatacggaccgaggagtaatatttcagcgcgcggccgccggtggtgacttcggggttgccgtagaccacgccgaccttttcacgcagctggttgatgaagatgcagaccgtgttggtcttgccgatgatgccggtgagtttgcgcagggcctggctcatcaggcgggcctgcaggcccacgtgggagtcgcccatctcgccctcgatctcggctttggggaccatggccgccaccgagtccacgaccactgcgtcgatggcgccggaacggaccagagcttcacagatctccatggcctgctcaccggtgtccggctggctgaccagcaggctgtcgatgtccacacccagggcgcgggcataggcagggtccagcgcgtgctcgacgtcgatgaaggcgacctcgcccccggctttctgggcttccgccagaacgtgcagggccagggtggtcttaccggaagattcggggccgtagacctcgatgacacggccgcggggcataccgcccacgcccagcgccaggtccaggcccaggctgccggtggagatggaatccacctgcatggccacgttggcgcccagcttcatcaccgcgcctttgccgaactgtttttcgatctgggccagggccgtctccagcgcggcctttttatctccgcccggcacaacgcgcttggccggggtcgctgtcttcttttccgccatgttgttctcctttactcaatgccgcaaacaccgcgcggctgctgcttgtggccgcaggtcacccgcccgcggcatctgtatcctattatatacgggtcttgtctaaattacaaccataagttgtcaatttaacataaatcctgattcaatttgtccggggacggcacatatacaccgcccggggattgccgccgtaatccttgcggcagtggatctcctgccagccggcctcccgggcaatggtctccaccgcttcctgctgctgccagccgatctcaaataccagccagccgccgggacgcacccggggcagggccgcgcgggcaagcaggcggtaaaactccaggccatccgctccgccatccagggccatggcgggctctctggctgtctcgggctggagggctgccatctcctcccccgtcaggtagggcgggttggagacgataaggtccaggctgtccgccggctgtgccgccagccaggctgccgcatcgtccagcacggcttccaccgccaggccccggtccttcagggcggacacggcgtttttcgccagataggcaaaggcctcggggcttttttccacacaggcgacctgcgccccaggcacaaagcgcttgatgcccaaacccaggcagccggtaccggcacagaggtccgccacccggggtgcgggcccgccccaccggcgcagcaggtcgatggccgtctcgcagacgacctcggtgtcggcccggggacacaggacccccggccccacctggagggtaaagtccagaaagtcccactcccctgcgatatactgcaagggttcccgggcggcgcggcggcgggccaaagcctccagttttgcggcggcgtccggggaaaggggcatatcgtccaggcgagggtcccggccggtggccagggtgtacagcaccccggcatcataaccggcatcgggacagccggcagcttccagatggcgggcgatctgccgcacggcggcgcggggggcaagccccgtcaggcttaccatgcgccgtcctcgggacggtctggcaggaccggagtgaccgccgcgatggcgacctcgatcatggaatcgtccggttcaaaggtggtcaggcgctgcagccacagccccggccgggacactgcccgggccagcaccgagttggaacgccccgcccatttgatgacctcatagctgacgcccaccagcaccggcagcaaagccagcttgtacaccacccgcagggcggtactctcccaggggaggacggcgtacagcacaatgccgatgaggatgaccaggaacaggaagctggtgccgcaccggggatggaagcggctatggcggcggatgttttccaccgtcagttcctcccctgcctcatagcaggcgatggtcttgtgctcggcgccgtggtactcaaacatgcggtggatctccttcatgcgggagcagaggaacatataggacaggaagatcgccagcttgatgacgctttccagaatgacccggggccagcggcccagttccaccacgttacccagagcccccgtcaggaaggtgggcaggaaggtgaacaggaaaatggccagcgccacccccgcaaaggcggaaatgcccatgagcacattctggaaggcggggccggtgtgctcgtccagccatttttcaaacttggactccgactcctgctgttcttcctcggtcatggcgacgtccgccgagtgcatcaggtatttatagccgttgtacaggttgtccgccatattgcagacgccccgcagcagcggaactttgttgtaccagtgggtgtgcacgtcggaatagctcaggtcgatggttccgtcgggacggcgcacggcgcagcagatctttttggggccgcgcatcatgatgccttccatcaatgcctggccgcccacactggtgcggaatttttcggtaggacgtttttccaaatccataggtaatgatactcctgtaaacgttttgggtcaggactgcgctccgctttccggggacgattccggcagatgcagcgggtcgtgcaggtattcctgtccggcgcggtaaaggggcagcgtcacgctgacggtggtgccttcccccagggtgctggcgatgtccagggtgccgcccagggcggcaacgatctcatccaccacggccaggccgatgcccgacccccgcaccgagtttttgcccttgaagaatttgagacggaccttttccaggtcgtcgggagaaatgccccggccctggtcccggatggaggcggtgaccgtctcgggcgtgcgggacaggatgatggtgatggccccgccgggacgggaatacttgatggcattgtccaggatgttcacaaacacctggcgcagccgccccgggtccgcccacaccgggtagggttcgggcggttcctcgtagatcaggcggatgccttccttctgcatccgggcctccacaaacagggcggcgtcggtggcttcggccaccaggtccagcacctgacagttgagtttgatgccgttctgcatgcgggagaagtccagcaggtcctccaccatctcatacaggcggtcggtctcggcgctgatgaccgcaatgccccggcggtaaatttcatcgtcgggggcggcccgggtggcgatggtctccacccagcccttgatgctggtcagcggggtgcgcagctcatggctgaccgaggagatgaagtcgtttttcatccgctcggtctcggccagagcctccgccatctggttgatggtattgcacaggcggccgatctcgtcattgtagcggctatcgggcaggcggacggtcaggtcccccttggcaatgcgggtggcgatggtctccacctgggccacggggcggacgatggaccgcacaaagaacaggccgctccaggcagaaacccccagcacgaccagggcaatgcccagcgagaacgccacatactgcatcatgcggcggtccaccagtgtcaggctggtgaccatgcgcatggcggcgatgccgtccgctgcatgggggaccagggccgtgacggccatgaccttttccccctccgacgtgcggaaggtggacacaccgatgccgctggccccggtcatagcgtcatagacgtcggtaccgcccagcagttcacgggaaaaggtgccgctggaagtggcaatgaccgcaccggaagaatccagcagcataaattcaaatttatctttttcgtcaaacagttccaccgcccggcgcagagccatgccgcggctggcggaagcgtcgctctcgtcccccgccgtgcctgtggcgctgagctggccctcgatggtggagaagcggctgagcaccgcctgccgcacaccgccgtacaggtcctgatagctggaatacaggaacaaggtctcggccaccaccaccaggatggcggtgatcagcaggctgccccgcagccagcgccgggtgatactggtgaaacccgcgtttcgttttgccatgcgaccctccgtggtccggtcaggcgttccaccggtagccgtaaccccagaccgtcaggatatgttcggggttgctgggctcgtcctccactttcatgcgcaggcggcggatattcacgtccacgatcttgacgtcgccgaaatatcccttgccccagacgccttccaggatcttttcccgcaccagggcagtgccggggttcttgaaaaacagctgcatgatctggaactccacctgcgtcaggtcgatgggccggcctgccttgtacagcacgcggctcttttcatccagaacaaagggtccgctgaccagctgatccggctcggccacgcggccgtcgggagcgctgcggcgcacccggcggacaagggcctccacccgggccaccagttcggacaccgagaagggcttggtgatatagtcgtcggcgccgatggacaggccccggatcttgtcctgttcctgtcccttggccgacacgatgatgatgccgatgtccgggtcatcccgccggatggtctcgcacagggacagcccgtccatgccgggcagcatgatgtccagcaaagcggcgtcacagggttcgcccgcgtggatctgttccagcgcgcgctcggcgctgggggcctcgactacgtcccagcctgccagcttgagattgagcgccaccatctcgcggatgcttgcctcgtcctcgactaccaggatgcgtttcattgggatctcctttccggttacgtgggctcaaaatcgcccgttcctgttttgtgatccggtatgaccggtcattcaaacagcacaacgcctttttgcagctccaccacgtccagtccgtaatagctgcggatcagacggaactgcagctgctgattgccaatgttggcgatgcggctgtaattgtcgctgttgacctccgaggggtccaccacccggatctcacagtagatggatgtgccctcggcattgcagatgagccatccggtgcccgacccgttggagcggatcaggatattgccgtgcattgactcgggcagcggaataaagtaacggtactccgagtcatagacgccgaagcagtcgctgctgccgtcactgtcgtcatagtcccgccagagcaggaacttgagacggctgtccaggggggataccagctcgccgccgtcgttgagctccatgggaatgtcgatggagccgttgccgtccacgtcggtgctgaccagcgcggtgtcgtaccgcagcgtcgtgcgggaaaggtcccccgcgccgggcgggtcgtagctggacaaaaagccggtctcctgatcatagacgatgatgctggtggcaatgctgttctgggcggtgcttgtccacccgtccatgatgagccagggattgccgtcggcgccggtgcctgcgtgcagggcggcgcagccggtatagcggcccgaaccgactttggtggtctgggcggagcggaagccgtccggggtgttggtgagcagctgcaggttgacgccgtcctcactgtcgctgggcagagccaggaccaggtcctccgtctcgtcggagccggtcatgtcggccacgatcatgtgggtgtactgctgactgatgaccgtttgcagcgtttcttcgtcatacagatagaccaccaggtatttgtcgccctgggcgctgccgtagcccaccaggatctgctgggactccgaatcccgcaggtgggcgtaggtgaccgattccacctcgcccgaaagaccctcgatggtctgggaaacccgccagctgtcctcgtcggtggcctccaggatggccagccagacgttggtactggcatccgaggtgtaaagcaccgcggcctcaccgtcgccgtcgccgtcccagtcgccgaacaaaaacggggagaggaattctccgctggcgggatagcgcagggtggcgctgatgcccagataactgttaagcgcgttctgcactgcggcggtctggccggacagctgcggcgcgcgcaggagtgtttcaatgtctgaggaaagcggcgaggccgaacaccccgccagcatggcggccgccagcagcgcggccgcaagttttttgtcccgcacgggcagccctccttccccgcaggctgaaattccgggaacggaaaaggctgtccctttcccgctccgccgcaccggaccggcagtcccgccgggggtctgtccgcgggggtttcctcccgtccgggcggcatggcatactgggtttagtataccacactcagggcagtgccgcaatgccgaggagcatcgccaggcagcccgcagcggcccccgccgcccccgccgtgcctgctttcagggcctggggaagaagctgcgccagggagacccacagcatgacccccgccaccagcacgacggtgccgttgaccagccccggcgtcagcacgctgcgcagcagcagccaggcggccaccgcccccaaaggctccgccagccccgaggccagcgccgccgcagcggactttccccgttttcccgtggcgtagaccaggggcgcggccagggccagcccctccgggatgttgtgcatggctacggcaagggcggtgcgcaggcccatttccgggtcggcggaacctgcaaacagggtcagcaccccctccggcagattgtgcaggaccagtgccgcccccgtggccagcgcagcccgcagcaccgccgcccgggaagcatcgccgctgcaccgggcggccagggcggcttcgtcgggcagcgcccgggacaaaaacgccgccgcgccgatgcccgccagcaggatcaaaaccaccgccgccccgcacggaaagggcggcaggtaggccgcatagtaagcgatggcctggggcgccaggtcggccaggctgacggtgagcatgatgcccccggcaaagcccatgctcacggccagcatccggggcgtggggcgcacccagactgccaggatgccgcccagcccggtggacagccccgccatcagggtaagtacaaacggtgtcagttccatggtcatccctcccgtctaaccctatgcggcgggcagaagatttagagcggcttttgcgaccgccccctctgacagccgggaggaaacacaaaagccctcccctgctgcggcatgggcagcgcgggagggcggaaaatcaggaagttttgtcgggtgcggcgggttctttccgggcggcggaggagcgcccggtggccagggtggagccaacgatggcggcgaacatcagcaggcagccggcgatctccaccgggctgagcttctggcccagcagggcccagccggccagggcgccgaacacgctttccaggcacatggcaaggctggcgatggtggggtccagcccccgctggccgatgatctgcagggtgtagcccacgccgctggacagaatgccgcagtacaggatggcgatgcccgcccccttgatctgctgccagtcggggtgttccgtcaaaaacataaagacggtggacaggaccgaggtggtcaagaactggtacaggctgagcagcacgccgtccaccttggggctgtaatgccccaccagcataatctgcaccgcgaacagcagggcgcagagcaggagtttcagctcgctgacggtcagggacaacgtgtcatgccccgccatgcagagcaggtagaggcctgccacactggccgccacgcacagccagatgcggcggtcggggcggcgtcccagaaagataccgcacaccggcaccagcaccacatacaatgcggtgagaaagctggccttggcggtggagacttcccccacggccatctgctgggccgcggacgccgcaaacaggaaaatgccgcacagcacaccgccccgcagcgccgtcccgggggcggcaggggtcaccgccgggcggacattccgtcccgcggccagacggcggcgcaccagcagcagcaccaccagaaacccgcaggccagccagctgcggcaggccaggaaggtgtatgcctccacatagccgcttcccaccgactgcgccgcaaaggccagtccccagaccagcgcgcccaggaccagcagcgcggtattgcgcacctgtttcacatccattgtccttttctccttttcctctcccggatgtcagcccccgccggggcgcaaaaaagccgccggcctcgaggcgggatacgcgctgggcgttcccccgccggagccggcggccaagcattttcagaattgagggatcaatccttgtcggtttcggtctgtaccagcgcgtcgtcggtcaggccggtgacggtcatgccgccggtgatataggcgaccgtagaatcaaagctgatggtcgccttgtactttttgccgggggtcaggccgctgatgtcgtaggtgtagcaggtctcatcggaggacacggaaaaatagatcgtgctgccctgcacataagtggtggtcttgccgtcgtcggaaagctcccacagcgcaaccttgtaggtgtcgtagctggtcttggtggcgtcggtggagccgtaggaggtcaccgtcacactgtcgccggccgcagtaaagtagtcggtgttgtagccctgaatgttgttgaaggagatatacagcgtaccttcctgcagcagggtattggcgcggctggtggtgtcaaatccttccgggaaggtgatggaaccgcctgcggtggccatggtctcggtggcttcctcctcctcggagtcggcggtggtgaagcccagtgcccggaccacacccaggaccatattctgtgcgatctccttcgggctgcaggccgtcagggaaaacgccagcgccactgccaggaccagcgccagaacgcgatgatgcaatctcatataaaaacctccacggggaacgttgtttgtcagatcaccggcgccgcgcgccggttgtctgttccattataccccatttaccgcccatccacaagcgaaagttttgtaaaccgcccggcacggcgctctgccataggttttggctatcccgcccatgcaaaacaggtatttgtcccaaagccccgcccgtgctagactgaaaccggaacctcaccccgcccgccgggcggcagacaaaaaaaggagccgacgtctatgaacgcttttgccgccggagccgtcagcgcggccatgctgctcctgctgggcgcaggggcacagttttccccggcgcagcagccgcccgccggtaccacagaaacggaggaaacatccatgcagatcgagatccttgtgaacggtcagagttttccggccgaactgtacgacaatgacagtgcccgggagcttgcctcccgcctgccccttgaactgaaaatgcaggagctcaacggcaacgagaaatactgctacctggacgacagcctgcccgcccatgccagccgccccggcaagatccatgccggggacctgatgctcttcggctccgattgtctggtattattctacgaaagtttttccacctcctactcctacacgcctttgggcgcggtggaaaacgcccggggcctggccgacgccctgggcagcggcagcgtacaggtcacgctccggttctcctgaaaaatcgcacagtatcgcaaaacagccccgccctgtccggtttttggccggaggggcggggctgtatgatttcacaaagagcttgctgccgtcacagagcggcatccggggtcccgcgcagatcctccagcgtgacactgtcggcatagcggttgatgacgtcgttgagcccggcccagaaccccagcgtcaggcactggccccgccggggacagatctcggcattggaagccaggcagggaatggaggtcagctccccctcaatggcccgcaggatttcccccgccgtgtactccgccgcaggccgggccagacggtagccgccctggctgccccgcccgctgaccacaaggcccgcccgggacagcggcgtgatgatctgttccagatatttcaggctgatgccctgatgttcgctgacggtcttgaggggtacaaactcatccgacgggtgattggaaagttccagcatcagccgaagggcgtaacggtccttggtcgaaaacttcatccggtaaacaactcctgtactgcagaaaatcccacaccccgcgggcatccgtataccgccgcgggttatttcaacatattgtcctatttgatggtatctatatcatagcaaggttctatgtgttgtgcaagagtatccgctcaatttgaacactgcgtcaaaaaacaacgtttccccatggattttatctgcaaaattttgccaaaaagcggatattttgacacaaagcgcatgttttttgcaaaattgcggttgacagacggtgcgggggttgctatactctaaaccatgaaaaccgcccggcacgggcgttagggaaggagatgccgtcgatgtaccgtcgtgatgccatgatgatgtgcatgtacagtatgccgcggcagcctgtgcttgcttccctgtgcgcctttacgggtgtatgacgggacattcaaggggcaggacgccgcaggcgtcctgccctttttcttttgcccgtatccgccgccgtggtttttcaaactttggaaagaggaggtttctgcaatgagaaccggccccgcctgcaaacagcccggtatccgaatgtgccgcaccgcacattgccccgcaccggttactttgcagaaacacaaaaacaggaggattccatcatgaaaaagctgatttccgccgcgctggccgctgtgctggcgctcagcctggccgcctgcggtcaggacacttcttcgtccgccgctgccgacaccaccgccgacgcttcccagggcagccagaccgcctctgacgagacggcaggcaccttcaccggcgacggttttgacgagagcatcgactacgcttccctggacggcaccaccatcaaggtcgccgcctcccccacgccccacgccgagatcctggccgtggccggggacatcctggcccaggcgggcatcaaactggaagtcgtcgagttcaccgactacgtccagcccaacatggtcaccgagagcggcgaggtggacgccaactacttccagcatcaggattacctgaacaacttcaacgaggaaaacggcacccatctggtctccgtggctgagatccactacgagcctctgggcctgtacccgggcaagaccaagagcatcgacgatctggcggacggcgccaagatctccgtccccaacgacaccagcaacgaggcccgcgccctgcagctgctggccgcccagggcctgatcgagctggaccctgacgccggcctgaccgccaccaagaacgacatcacctccaaccccaagaacctggagatcgttgagatggaggctgctcagctgccccgcaccctggccgacgttgacatggccgtcatcaacggcaactacgccacccaggcaggcttctcctccgccaaggatgcactggccgctgagagcgccgactccgaggccgcccagatctaccccaacgttctggtcgtcaaggaaggccgcgagagcgatcccgccatcctggccctggctgccgccctgcagagcgacgccgtccgcagcttcatcgacgagaacttcggcggcgcagtcgttcccctgttctgatgtccccggccctgtgccggataccttataataatagccggtccccccggcaccccatgcaggaggtcctttgcagatgatcgagatacaaaacctgaccaagcggttcaccacccagggcggcaccgtcgtggcgctggaggacatttcgctgaccatccgggatggagacatcttcggcatcatcggcatgtccggcgcaggcaaatccacgctggtgcgctgcatcaatatgctggaacgccccgacgagggccttgtggccgtcaacggcaaggaaatgcagaccctctccccggcacaactgcgctccgcccggcgtgagatcgccatgatctttcaacagttcaacctgctgatgcaaaggaactgcctgaaaaatatctgtttcccgctggaactggccggccgtcccaaggcggaggccgaggcccgtgcccgccagctgctggaactggtcggcctgcccgacaaggcggaagcttacccggcgcagctttccggcggacagaaacagcgcatcgccattgcccgcgctctggccaccgatcccaaggtgctgctgtgtgacgaagccaccagcgccctggaccccaacaccacccattccattttgcagctgatcaaaaagatcaaccgggagctgggcatcaccgtggtggtcatcacccaccagatgagcgttgtggaagagatctgcaaccgggtcgccatcctggacggcggccacgtggtggagcagggcgacgtgggacagatcttctccaacccgcgcaccgcagccgcccgcaagctggttttccccgcgggcgcggcacagagcgagctggtccccggccgccggatggtccgcgttgccttcaacggcacccagaccaccgacaaaccgctggtggcaagcctggccatcgagtgcaatgctctggtctccatcattgcggcggacacccgcatcgtcaacggccagaccctgggcagcatgcttcttgccctgcccgaggacgaagccgccgcacagcgtgccatcgactatatcgccaactatcccggcctgagttttgaggaggtgaagcaggcatgagcgccttttttgcatcggatgaatggctgaccctggtggacaatctgcccaacctgccttttgccacctgggaaagcctgtacgccaccgtgctgtccaccttgctggccatggtcatcggcctgcctttgggcgtgctgctggttgtgggggaaaaggacggcatcctgcccctgccccgctggctcatggcggtcatcaacactgtcatcaaccttctgcgcagcgttcccttcctcatcctcatgatcgcagccatccccctgtcccggctcatcatgggaacttccatcggtacgctggcttccatcgtgccgctggtggtggcatccttcccctttgtggcccgcctggtggagaccagcctgcgggaggtggaccccggcgtcattgaggccgcccagagtatgggcgccaccccgttccagatcatctcccgggtcatggtccccgaaagcctgcccagcctgatcgccaacgtcaccattgccctgaccaccattctgggctactccgccatggccggcatcatcggcggcggcggtctgggccagatcgccatcaactacggctactataaatataagtacctcatcatggtggtggccacggcgctgctggtcattctggttcagatcttccagtccctcggcacccggctttccgtccggtgcgacaagcgcctgcggcggtaattttcccccatacaagcaagcccggacggcgggaacgctctttttcaagaaagcgttcccgccgtccgtttttgtttttcatcccgtattcaaaggcttttccagcatttttgataacaggtatccaaagtaaaaatttattcaaggattcttgccaaattcttcaaattccttttataagttttccatatgcggcatatatactttaggcatagtcaaacaagacttacggcagcaagtgccaatgccgatacattcactggtacttccgccatgcgagggcagcagcccggcggaggccagacaaccaacaatgccgaaaggctttttatatagatcgcatacttcccccggtatgcccccaaaaggaggatgccgccgcgtcacaccgatccggccgcgctcctccttttgggcggcacaaacaaaccttccttctttttcaaccttcctatattccccctattcaaaaagcggcagctccccggtcaggagctgccgcttttgtgatgtgcaatcttgctttccgcgcctcgcaggccgtttactggccgccgtgctgtttcatgtgggcgcgcaggcagtccatggtctcctcgctgaccacatgctcgatacggcaggcatcctgggcggcgatggcctcgtccactcccagggaagtcagcaggctggtcagcaggcggtgccggtcatagacgtgctccgccacgctgcggccttcctcggtgagggtcagggcgccgtcgcgggggtccatccggatcatgccggcggtacgcagcaggctgatggcgcggctgacactgggcttggtcacgccgaggcgttcggcaacgtcgacactgcgcacatagggcttttcctggctgaggaccaggatggtttcaagataatcttcacgggactcagtagagcgcatgggcagagagcctccttccgggaactgcaccttccgcggcctgtccgcaaaatctcatggcaggccgccaatcataaagttatagaatattgtatacttttttgctgcttctgtaaagcccgcgccgccccttccgtcatgcccgaaaaatccagaaaaatccggcccggacggcacgattttccattgccgccgcagcccgcagccgttatcattaaatcagagattggcggcctgccgggcgtccggcgggcggacaaggaggcaggcatatgcaattttccgagaccatgctggccgatcccagggtctttgccctgggacgcctgccggcgcattcctcccaccggttctgcttcggcagcggggaaagctgtgagctgcccctggacggcctgtgggacttccgctgggcgccccgccccgacggagactttaccccctggacgcagatccgtgttcccggtcacatccagctgcagggcggccccgactatcccttcggcacgccccagtacgtcaacaagcagtatccctgggacgggcatgaggccatccgccccggtcagatcccccagcgctggaaccccaccggcgagtaccgccgcacctttgttctgcccgatacctggcagcgctgccgcatccgctttgagggtgccgacagcgctctggccctgtggtgcaacggcgtgtttgcggggtactcggaaagcagctttgataccgccgagtttgacctgaccgagctggtccggcccggtgaaaatgagctggtggcccgggtctaccggttctgctccggcagctggctggaggatcaggatttctggcggatgagcggactgttccgccccgtcaccctctttaccacgcccgacgcccatctggcggacattcgggttcagactgccctgaatgccgacggcagcgccgctgtgcaggcggactgccgtctggaaaacgccgggtcagccgccgccctgcgtctgaccctggacggccacagctggcagctgcccgccggggagaccgtctgcgtcaaggcaggcatcgaccatccccggctctggagcgccgagactccccacctgtatcccctgtgtgtcgaactgcttgacaccgacggaaacgtcatcgagcggagcagcctggacatcggtgtgcgggaattcggcatccgggacggggtcatgagcctcaacggcaagcgcattgtattcaagggtgtggaccgccacgagtggagcgccgaacacggccgtgccgtcacctatgaggagaccgagtgggacatcatcaacctgaaacggcacaacgtcaacgctatccgcaccagccattatcccaaccgcaattttttgtacgacctgtgtgaccggtacggcctgtatatcatcgacgagaccaacttggagacccacggcagctgggaaaagcccgacggcatccatcccgacgaccgcaccctgcccgacggccatcccgaatggcgggacgccgtgctggcccgtgccgaagccatgtatgagcgggacaaaaaccatgcctgcgtcctgatctggagctgcggcaacgagagcttcggcggagaaacgctcaaagcggtgcacgacctgctgcgggcaaaagaccccggccgtctggtccactacgagggcatctcccatgaccggcgcttcaacgacaccagcgacatggagagccagatgtacccctctgccgctcaggtgcgggaatttttggccgagcaccgggacaagcccatgattttgtgcgagtacggccacgccatgggcaactcctgcggtgcgctggaagaatacaccgaacttgcctggcaggaacccttgtatcagggcggatttttgtgggagtacatggaccactccctgtggcggcagctgcccgacggacgccgggtgctggtctacggcggcgattttggtgagcggcctcacgacggcgagttctgcaccgatggtctggtcaccggcgaccgccgcaacagcgccaaaatgcaggcggtgcgcggggtctatcaggactttgtcgttcaggtggatgccgacggcatccggctgtgcaaccgctgcctgttcactgatctggaccggtttgacctgcgcgtgaccctgaactgtgacggcgagctccgccgctccgccacgctgcggcaggcactggctcccggtgaaagctgcactctggccctgcccttccccctgccccaggacgacggcctgtggacggtggacgtgaccgtctgcctgcgggaagccacgtcctgggccgatgccgggttcgtggtagctcagggacagggcatctttgaccggcgtcccgccgcggacagcgtccccgccgacgccgccctgtttgccgactgtgacttcaactacggtgtgaccaacggcgactacgggttcatcatcaaccgtaattctggacggcttgtctccctgcgccgccgcggggtggagctgctggacggtcccgccgagctgaatttctggcgcgcccccacctgcaacgacgacggcgccgccatgcccttccattttgccaaatgggcgcaggcaggccgctatgcccaggcggatgccgtggagcgggtacgcggcggcgtgcgggtccactaccgcctggcaactgccgaacaggaaggcgtggaagccctgtggaagtttgacaatcagggccgctgcaccgtgaccctgacctgggagggcggcgacgccgaggtccctgagttcggcctgctgctgcccctgacggcccgtctggaccgagtgtccattctgggtcttggccccgaggagaccatgcccgatcgggagcggggcgccatattcggccgctgggagtatcccgtgggcaaggatgaggacatctacatggtcccccaggaaaacggcgcccacaccggcgtgacccaggcgaccctttccggggacggcgtgccctccctgcacttgtccaccacgggagagatgatcttctccgccgggcactggacccccaatgagctggaaaatgcccgccatttctggcagctgccccccgtgacccgcaccattgttcgctgcgcggccggaatgcgcggcgcgggcggtgacgacagctggggcgcccttccgctagaaccctaccgctacaccctgcaccggggcgacagctttacctttaccttctggaccgagtgacgtctctttcaatttcacgataaagcgtaaaatctcataatatcacaaagcaaaaccgccccggagcgcacaatgtgctccggggcggtttcgttgtccgggaaagctcccggcctgttataggccatcactgacggatggcgcggacgacacggaccatgtcgttatcattttcgcagacgatgttcaccgggctgctgtaatccaggctcatcatgcccagaatgctctttgcgtctgcgatgctgcctcgcatgtcatgcacgccgacatcgttttcgcacttggcggcggcagacacgatcccctggacttcggagaagctggaaaccttgacttgtctcaccataattcattcctccatgatttaagggcaaggggccgggcaaccgattgttgccttcctgccttgcaatcctattatagcacaaaacttttcaatgatgattttgaccaaaaaatcttcaacaaattcgtcacactgaccaaaacccaatttttccctctcacaggatttggattagaagcacaaaattatttaagtattttttgcgatttttcgctttttcggtactatctattttattttattgtattttcagattcaaatacccgttttagggtcccatttgtatgcattttacagacattgggcagtctgaccaacatgccgggagcggatttgtaaaaatgttgtattccggtgccgtacactcccgcttttgaaaaccacgaatccacgcacatggcaccaaaaaggcatattcgggggtaaattttgtgtcaagcacagggcggattcgtacgatgtttttttacggtgatttgactgccgtatggtttcgccgggaaacgggcgaaactataataaaatcgctgcgggacggaaccctgctccaaaacctccgccccggcagcaacataccgaatctgctaacatcaaggagagaggatctacatgaaagacctgaccaaacgcgctgttgccctgctgggcgcggcctccctgaccttcagccttgcggcatgctccacccccgccagcgaggctcccgccgacgacagcgcttccgctgttgccaccgccgcccccactgcggagactgcttccaccggcacccccaaatacattttcctgttcatcggcgacggcatgagctatccccagatccagagcaccaactattacctgtccgctctggaaaacggcaccagcatgggcggcgacggcgccgtcctgcagcacgagaacgccctgagctttgtggatttccccgtggcaggcagcgcccagacctatgacagcacttctttctgcccggactccgcttccaccgccacctccatctccaccggccacaagacttacagcggcaccatcaacatggatgagaccggcaccgtcgcctacgagaccatcagcgaaaagctgaaggaccagctgggctacaagatcggcgtcatctccagcgtcaacctgaaccatgccactcccgccgccttctactgccatcaggtcagccgcaacaactactatgacatcggcctggaaatgatcgacagcggctttgattacttcgcgggcggcgctctgctccagcccaccggcaaggaagaggaccagaccgacctgtacactctggctgccgaagccggttacactgtggtcaagacccaggcggaagccgagaccgtcaccgccgacaccggcaaggccatcctcatcgacgagcacctggccgacggcgactccatgccctatgagctggaccgcaccgacgacatgtggagcctggccgactatgtggaaaagggcatcgagtgcctggacaacgacaccggtttcttcatgatggtggaaggcggcaagatcgactgggcctgccacgccaatgacgccggttccaccctgcacgacacccaggccctgtccgatgccgtccagaaagccatcgacttctacaacgagcatcccgacgagaccctgatcctggtcaccggcgaccacgagactggcggtatgaccatcggttacgccggcaccaactatgacaccttcctgcagaacctggccaaccagaagatcagctacgccaagttcgacagcgattacgtcgcctcctacaaggaaaacaacaccagctttgacgaagtcctgcaggacgtttccgacctgttcggcctggtgaccgaggaagcctccggccagcaaggcgagagcggcgtcaccaccgacaacgccgacagccatcccaccggtgtcacttccggcagcctggtcatgaccgactacgagctgagcctgctggaagacgcctacaacatgaccatgaccaagaccgacgacaccgagctgacccaggccgagtacgtcctgtacggcagctacgagccgttgagcgtcaccatcacccacatcctcaacaacaagtctggcatcgacttcaccagctacagccacaccggcctgccggttgccgtctttgccatgggcgaaggccaggaactgtttgagggctactacgacaacaccgacatctacaacaatctggcccagctgaccggcgtggcctgattgcaagcgcaagggatcccctgcgcggtttcttctgccggcgtctccgccagggcgtccctccgcccggcggagacctttttctgttcccgcacatcatccgcttttgacaaaggagagtacacacaaccatgcgagcaaaaatcctgggctttttcaaacggatctggggcgagcagccctccgcctggcgggtgctggtcccgggcctgatcctgaccgccattctgctggtgctgcccaccggctacgagggcgcgcagatctatcagggcaccgacaaggtccgcgccaccatcctggaaacagacaacagcaccatcatcagcacggggctgatccagaacggcgagcagcgctgcaccctgcgcattgaggaaggccggtttgccggtcagaccgccgaggccgtcaacctgctcaccggcagtctggaacaggacaaaatttttgcccccggggacagcgccctggtggtggtcagccatgcggacggggccatcacctcggtcaccatgatcgaccattaccgcatcagctgggagctgctgctggctgccgtgttcaccctgttcctcattctgtttgcggggccgggaggactgcgggctatcctttcctttgtcatcacggtgctggctatctggaagatcatggtccccgccaccctgcggggcgccaatcccatcctggtgggcctgctgctggtggccctgctgaccgtggtcatcatcgtctttgtctacgggttcgaccgccgcagcctcaccgccatcctgggcagtatgctgggcgtctgtaccgcctgcatcctgggcgtggcctttaccagtgtgctgcacatccacggcgcggtcatggccaacagcgagtccctgctctacgccgggtaccaggacctcaacctcacccgcatttttatggccagcatctttatcggggcttccggcgccatgatggacctttcggtggacatcaccagcggcatctgtgaagtcgtgcgcaaaaagcccggcgtccgcccctgggaggcggtgggcagcggcatccgcatcggtcaggccgccatgggcaccatgaccaccaccctgctgctggcctactccggcggatacctggcccagctcatggtctttatggcccagggtacgcccctggtcaacattttcaactacaagtacgttgccagtgagctgctccagacgctggtgggcagctttgccctggtcaccgtggcgccctttacggcagtggtgggcggtttcctgctcacccgccggggcgcggtccccgccgaaccggcagaacctgccgccgcggactcccagtcccccgccgcctgatcttccctgtcacgcaaaaccaccctgacggaccacagcagtccgcccgggtggcttttttatcatgtaccggtcaggaggcgggcggcagctcggtcacggcccgcagcaccgccttgcggtggagacgccgcacccagcggtattccaggtgcatctgctccgaaatttcggtcagggtctggcccagcagataccggcggcgcagcagttcccgctgggtggggtcgaacaccgtggagatggaccactgcacctctgcccggatacggtgggtgtcggcggcggccgcggcacagcgggtctccgcccgcatcaggcgctcggcggcgcgctcggtcttatccccgtggcccgacgcccggggcatcccgtccaccggccgggcatggcagagcaccgtcccccgggcctgctccagatccagcgccagcagctcctgacgccgcagcgcacggcggtaacggctcagccactggattttttcctccacctgttctctctgcgttttctccataggttccctccctgtttgccttttcctcatcgatcacccgggccagacagcgcggccacaggcagtagccggtcccgtcacaccgccagcggcagtgccggcagcgttcgccccccgccctcatgcccggtcctcccggcagcgggtcccgcaccgcaccgacagcggctgctcccatacttccagcttcaccgtcagccgcccggccaggcagagttccccctctccgtcgggacatgcttcccgcagcgcctgaacgagccggggcaaaacctcctgcccgcccacttcaaatgtaccgtaccggtccgcgcgcacacagcccgcgcccttcatccgtatggttttgtgcatcacagtgtccctcccaaaaactcaagatctcctccccgtacagggtcacaaactcccgccccgcacgggtatccctcaaaatatcgtccagcgcgtcggcggggtcggggagcggccctccccggtcgtaccagcgcaccttgcggccttcttccagagcggcatcccccttccggtgcgtttcacagaagttttgctaaacagtcccatttatcgtcctctcccggaactataataaaaagcacagggttttcccgcgcaggacggctttgtccggcggtgcacacgccgatgcagccatcccggcaggcggacggcgccggggatgctttgcaggcttgccgcttgcagcgtccccccgtgccgccttccccctttgggcatcgccgcggcgatttttcaaaaaagtcgccgcatggtgaaattttgtcttgacatttacgttattgcgtaatatagtaaatgcaagacatcgaaattacgcgatcacgttacgttgttcagtataattcgcaataatgcaaatttcaagtattattttcgttttcacgtaatttcagcgaaattgccatggaaagggtggtttttgttgtgaacctttatcagcgcatcgagaccctgtgcaatgccagggggatcacggtcacggaactttgccgggagagcggcgtgagccgcagttcgttgtccgacctcaagacggggcgcaagcagtcgttgtcggcgcaggcgctggccaagatcgcggggtatttttcggtgagtgtggacagcctgctgggctgtgagagctcggacgagatcgggtttgacgatttcacctacgcgctttttcacgagacaaaggaactgaccccgcagaataaggaaaagctgctggagatggcgcggtttttccgcgatcagcagcagaaagggaaataagggtatgcagctttgcgaggtatatgatgacgcccggcgtgcgggtgcgagaatctatgcctatgacatcgggtttaccgacgccgccaccattgagatgaacggcgcctacggtatctttgtggacttttcccgcgggaaggactggcgcaggctgagctggcagctggcccacgaggtaggccactgcgccaccggatgtacgcacaagctgtcaagccggcatgacctgatcgcccggcacgagtacaaggcggaccgctgggcgatcacccgctatttgagtgtggatgcgctgcgccgtgccatggccgccggttataccgagccgtggcagctggcggaatactttgacctgccccagcaggccattgagcaggcgctgcattactggacgcagtgccgcggggtggatttcaacacggcggcgggttgcgaggcctgcgcggatgtataaaattagaggttggcaatcccgggcaaacctgatataataaggaatagtcttggcaaaacccaggttttgccgatgcgggccattagctcagttggtcagagctggcggctcataaccgcttggtcccgggttcaagtcctggatggcccaccaatataaccgccccggcttcggccggggcattttttaatcaaaagggccatccaggacttgaaagcccggcgacggcgacgccggcgcaaaaaacagtcctgcggactgttttttagggcgtgggccaggtcaaaggatggcccaccataaaaaaaagaacccccgcacagggggttcttttttcatcaaaaggccatccaggacttgaaagcccggcgacggcaaggccggcgtaaaaaacagtcctgcggactgttttttagggcgtgggctaggtcaaaggatggcccaccactaaaaacgccccggcttcggccggggcattttttaatcaaagggccatccaggacttgaaagcccggcggcggcaacgccggcgtaaaaaacagtcctgcggactgttttttagggcgtgggccaggtcaaaggatggccgcagcaaaaagcccccagggtaaaaccggagttttatcctgggggcttgtactttatggatgccgggggatcagtgctgcctgcgtctgcaaagaaccaggccgcagagggccaggccgctgacggacagcagcgccacccacagggcggggctgctttggtcgccggtctgggggacggtgactgcggtggtggttccgctgctgccgggggtgtaggcgcctttcacgttggcatagccggacagctgtttcaccgattccagatagccgcaatggtcgcagcggtagcctgcatcggtggcggtccagttatggtagccgcaggccgggcaggtgtagtaaacggagtcatccggggtggaggtatccgagccggaaacactcttttgcgccacggcaaacttgaccgtcacattggtggcgacattatactggccgccggtcgcggcgaccgtgatggtttcttcataattgcctgcggccagcccggttttgggctgtaccgtaaaggtggcagtaccattcacgggcagttccgtggcagagagggtccccacctcaaaattggcggtggaggcgggctgggccagggtcaggggctggttgccggtgttggtgatggtcacggttttggcggcgggggcatccgcatagccctccgttttgctgtcaaagctgagaaccgcggtgtcggtggtcatgctgtaaacggggtcctttacggtcaccgtgcaggtggcggtgtagctgccgtccgtcgtggtgacggtaatggtggcggtgcctgcggccacagcggtgacgttaccgttgttgtccacagtggcaatggtgtcatcgctgctgctccaagtcacatttttattggtagcattgtcgggtgttaccgtagcggtcagctgttcgctttggccggtgaacagggtcaggtcggtctggtccagggtcacgccggtgactttgtacaccaccgaaccctcgccggtcggcgtaccttccagcttgccgccgctctctaccgtgatggtcttgccgttcatgttcagagaggctccctccgggatggtcaggctctcgccgtcgccaatctccaaatcctcctgcaattccacatcgccgtacacggtgccggtgccgttgtcaaagacaatgccgccggattcaccggtgccagctgcggtttgaacctcagcagaagaattactcgtaattccaccggcactgcctttggctcgcacgatggcgttgttgctgacggtgactgtggtcgtgtcaccggttccatcggcgccgaccgagagactaattcctgaaacattctccgacgatgctgtagcggtcagactgccgccattcacggtgagtgacgcacttgagttttcaccgctctgcagggtaacgccattgtaataggaacttgtggctgtgaccttcgcattctcgatgctcagggcagcatcaccgttgaagctgataacttgaattgggcaaaaggttgagtcgataaccagagtgccgttgcccgcgatggacaaggcggccccgccccctgaggaatgaacataaatccccgtgctgacttcgtctatcgtattgctgccttccaactggacggtcagctctgcatctccgctttgattgagcaccccaatggccgagccatggatggttgagccagctggagtattctgatcataagccaatccttttttaatggtggcgttgtgcagggtcagaatattggtatctgcgtcataatggatatagttgtccgaaggctgcgtgttacctgcgcttgtgacagttccatcgctgcccgttgtccagtagccggtggtagatatttgcacatcacctacataaagctcctgtccgctcggcgcagccgccagcgccgtgacgggcagcaggcccaggcagagggccagtacgcaaagcaggcttacgattcgttttttcataggggttcctccttggtctttgcctctggcggcagggcggctgcacacacccgggcggcatcggctgttcctttcagacctggtgcgttcaacgatcattccgtatggagaaatctccatacggaagagaggcatgcctctcttccgtgatttttttcctgttgtacaaaaaagcctgcaggctttttctcctgcaggctttccctacattattcctattataatataaaacgcccggacggcgcaatccccatctttgcccttactgtttgagcaggcgcttgagggggaccgtcacggcggtgccgaccacacagcagatgaccgcttccagcgcgccctgcacacctaccgacaggaccacgtaaatcagcgggttggctgcgcccagctcgaccaccttttcctgcacggcgggcatatcgtagaaaaacgccaccagcgcacccatgaacagcaccgtgttgagcagcggtgcgctcagcgcgccaatgaacgcgcaggtcttatctttgcccggcagcagcttgcagacaccgcggtaaatcagcccgcagagcagtccgcacagcacacgcgcgcccacacacatgacaacgcacaatgccggattgtactgaaatgcaaaaaatgtcaggccgcctgcgccgctgatggcgtttgccaggctggtcaggccgaaaatcagacccagccatgcaccggccagcgggccgcacagcatggccccgatggccagcggcacggtgagcaggctcatggtcagaacacccacccggatgtagcccagaaaggtgtttgccatcagcagcaccagcgccgtcaaaagcgccagctgcgtcaggtaacggacgttcttgcttgttttcatattcaatttcctcctgctgccgtctcttcttcggagtacagcgcatatttgcgggttttccgcgttaataagtatatcgcgctccggccgggttttcaaggccatgcccggttccggccaaaaacgtcgttttgaacaaaaaaaccaaaaaatgaaaaaagtttttcaaaacccgctacccaaaaattagacggcgtgttataatagtgacaattcgggttttattcgtatcatccggctgcttccggaagaacgatacaataaggaggaaccgtcatggatcatgttttgctgctgcccgccggtggtctgaccttgttcgacgcctcgctggtgtcgacaagccttgtgcttgtgttcggacttctgattacgctgtgcctgatcatcacgctggaaggcaagatcttcgattcgatcaacgccaaaaagcgcgcccaggccaaagacgccctgcatgtgggcgatcatcccgctccggcggtcccctccgcccctgcggcggctcccgcacccgctcccgcccctgtggtggaaggcggtatctccggtgagatcgtcgccgctatctcggctgccgtctattacaccgagggcgccgacgtgaccgtgcggggcatccgccgtctgccgcagcccggtgcatcccgccgcggcgtctggggcgatgccggcgtattgcagaacacccgtccctttatgtgatcgacggttctgggaaggaaggatgataaaatgggcgcgattataaccaacttacaacagatctttacaaactccggttatgcacagatcctttttgcggaaggcggctaccgctacgctatcatgctgctagtggcctgtgtgctgatctatctggcgatcgcacatcagtttgaacccctgctgctgctgcccatcggctttggtatgctgatggccaacctgcccctggatggcatcatccacatggacatcttcatcaacgagactcagcacatcaactgggaaatgctgggtacctcgggcggtctggccgactacctgtacttaggcgtcaagctgggtatttatcccccgctgatcttcctgggcatcggcaccatgaccgactttgaaccgctgatcgcacgtccctccagcctgctgctgggcgctgccgctcagctgggcatctttgttgcttacaccggcgcacgtctgctgggcttcaccccgccggaagccgcttccatcggcatcatcggcggcgcagacggccccaccgctattctgaccacctccatcctggcaccctccctgctgggctccatcgccgtggccgcctactgctacatggctctggtcccggtcatccagccgcctatcatgcgcctgctgaccactgaaaaggaacgccagatcgtcatggaggcgccccgcaaggtcagccacaccgaaaaggtcctgttccccatcatcgttaccatcctggtcagcctgctgctgcccgatgccgccatcctggtcggctgcctgatgatgggcaacctgatgaaggaatgcggcgttgttgagcgtatcaccaagaccgccggcaacgaactgatgaacatcatcaccatcttcctgggcttctccgtcggctgcaccaccaacgccgagaccttcctgaacatgcgtaccgtcatggtcatcttcctgggcgtgttcgctttcgccttcggcaccgcaggcggcgttctgctgggcaaggtcatgtgccttgtcacccacggcaagatcaaccccctcatcggctccgccggtgtttccgccgttcccatggccgcccgtgtttctcagaaggtcggccaggagtacaacccccgcaactatctgctgatgcacgccatgggccccaacgtggccggcgttatcggcagtgcggtcgccgccggtatcctgatcaacatgtgccgcggtatgtgatccgcatcttttccgaatcctggcagccgggccttttggcccggctgcttttttgtgcatcctgccgcttttggctgaaaatttttgtcagggcttgaccctgccccttttaccgcacataatagaatatgtgaaattttccggcgcgccctgcacggcccccacaaggcccatggccgccgtatctgtatctgttatcaggaggtattccctatggatcatcgcgacgatccccgcggacagtcccgcgggtccaggtcccctgccggacgtcccgccgggcagggggcgtccgcttccgccggcagcgcaaaggcccgtgcccgcgcccgccgcaaagcccgccagcgccgcgcccgcaaccgggtggtggtctgcctgtgcgcggtcattctgtgcgtggtgggcgccctgggcatcgcctacggtctgccgtcctcgggcggtcccgcggtaggcggcgactccaccaccgccggggcggatgcttccaacgtgtcggaggctacccccgcccccacgcccgatcctgccgcggagcgcattgagcaggcaacggcccgcaacatcgccaacgccaccaaggatgcccccgaggtcaaggacccggacacctggcagcagaacgcggtgactctgctggagggcctgcaggcaagcgaagagtacagcgaccttgacctgaccgtgcgggagggcttcccctacctgatcgcggtgaaccgtgcgtcctcggtggtgacggtctacgccgccgacggcgagggcgacgatgcccgctacaccaagccctatatggccatgatctgcagcggcggccccgacacccccaccggcgtgtttgagacgcccatcaactactcctggcggctgttgtccggcccctgctacggccagtacgccacccgtatctgggatgcgtacctcttccacagcgttccctactacacccagcacaaggacgacctggaatatgtggagtacaacaagctgggcacccaggcgtccctgggctgcatccgcctgatggtggtggacgtcaagtggatctatgacaactgccccatcggcaccaccgtcatcatctacgacgacgagaacgatcccggccccatgggccgccccggcaccatctatatcgacccggacgacgagtccatgcgcggctgggatcccaccgaccccgatcccctgaacccgtgggacgacgcctatctgaccggcaccaccatccgcagcgaggaagcctgggcggaatgggatgcggcccaggatgacgcccgttggagttacagcctgaccgagccggatctgcagggctggagcaccgactacaagaccgagggcacccgcggctgacgcctgaaggaccgcccgaccgacacaaaaatatcccctcccggaaccgttcggcgtgaaagtccgggaggggatcttgttttattctgatgctgtgccggtacagcgcgccgcggggtcgtggctaaaccgccgggacgctgcatatactagggtcagcggcggctcactcgccgtcctgggactcggcgttttcggcggaggcttcctccgctgcctgggcaagttcctcggtggtgggaccgggatagttggcgatggtgaccttctcgatggtgatggtgtcctcctcggtggggcggaaggtgtcgttttcttcctcgtccagcaccgtgtccacacaggccatcttgtccaccacatccatgccctcatacacctggccgaacactgtgtcggtgttgtccagatagggcagtcccccggccgccgcgtaggccgcaacctgggcctcggtataaccgttttcggtgagctgggcctgcatttcctcgtccacgctgtcgggcagagcagtcacaaaataaaactggctctggccgctgttggggtcgcccttggtggtggcggcacacagcgcccccgcataatgccggagggagctgtccgcttccagcgggatggggttgtccgagtagatggtgctgccgccgctgccggtgccggtggcgtcgccgccctgcaccgcaaagccgtactcgctgcgccagatgatggtattgtcatagtatccgctgcgggccaggcccacaaaattgtagaccgccatgggggcggcgtcggggtacaacaccacccggacctcccccagggatgtggtgaaaatggcgatgaggtcgccgtccgaaggctgggtgaactggcgttcggtgctttccacctcgctccggtcggggacgggataccggctgctctcgcatccgcacaggaggagcagggacaatatgacagcgcacagggcgcagaactttcgtttggtgatgggtgccaacggcggccctcctttccgccccgcagggcgcggcccggcagctggcgggccaaaaatatctataatattataccacatgccggcgcaaatagatagcgcttgacggcagttcaaaaaacaagtaaactaatagcatagtaacggggctgcgccccgcggaacggagaatcaacaactatgtctgacgagcttacccccgaaatgatggaagaagccgctcccgatcttctgactctggaagatgaggacgggcaggaatgcacctttgaagtggtggacgccaccgaggtcaaaggcacccgctatctggcagtcgtcccctatgtggaggaccccgccaacctggatgatgacgccgaactgatcatcatgcgcgtgggtaccgatgacgaaggcgaatatatggacatcgtcgatgacgatgaggaactgctggaagtgggccacgtatttgaggagcgcctgcgcgccatgtttgacatcgacgattccgacttggaatcctgagctttttcccctgcacggttcgatttgttgcagctttatataatcctactaatcaaattcagggagcccggtgtcggccgccggattgcagacctcccgccgctggcggaggaagggagcgtgaaagcgtccgcagggcacccacctgccgtacggtaggttttgattggctgcagacggccgcgcgggggttttgttgcagtaacaggcaggggcgcgcatagctgagcgcggctctgcctttttttgttgtccgccccttgtgcggacagattttgcggaagataaaatacccctctgtacagcggcggcatcccggcgttgcggcattgcggatgcccccggcagagggtcgaggaggctgaacactcatgggcaaacgggttgccccgggggacaagatcccttttttccagtatgacacaccttacagcgcgcagaacagcttccgcgcactgctggagcaaaatgcgcccctggtgcttgtgtttatgagcaatttcgggcatccggtcacccgcacctttgtgtcccggtactcccactcccgccacaagctgacggggggcggctttgccatggtggtgcgctcctaccccgaaaaactggcggacaacatcggtcccaacagcctaccctatcccctgctctgcgacgccgagggcgttctgtacgatctgctggacatcccctccaagacgggcttctggcggacctgctctctggaggcatggcgcatcctgaaaaaggcccgccgccgcggctatgtgatgcccgcccatcagccccagcagatgcccctgaccctgattttggactctgacggcacggtgctgttctgccattacggctccagcctgaccgatgtgccggaggactgcggcgccatgcagagcctgctggccgagctggacctgctgtccgaggaggacgaggcggaggaaaacgcctttgaatccgaggagtacgaggacggctaccccgaggccgacggcggctactacgaggaagaggacgaggattacgaccccgacgccgacgactttgccgacgttcccgacgacagcgacgtccgggaatacaactcccccaagctgtcccacaccatgctgctgggcctgctggacgatccctatcaggacgactgatctcctgcaaaatgaatttccccggcgttccggtctcagcggccagaacgccgggttttctttttttgagccggcctgcgggttttgagggcgttctacttgccgtttggagcctggcagggtataatgaactgtgtatacccgtccgcatggtttcattctgcggaggaagtgcaactactccggcccgccgggctgtcacgcccgtcacggccgttttggggaggacaaacctatgtctcgattcatcccgctttctgtaccgaattttggtgagcgcgaggccgaagccgcccgctctgccgttctgtccggctgggtgtccaccagcggcgcccgcgtcggcgaatttgaacaggccattgccgactacgtgggcatgccccgggccgtggccaccaacgccggcagctcggcgctgcatatggcggccctgtccgcgggcatccgcccgggggacgaggtcatcgttcccacgctgaccttcattgccgccgtcaacccgctgacccgctacgtgggggcggagcccatcttcatcggctgcgacgactcgctgtgcatcgatcccgacgccgtggaggacttctgcgccaaccactgcaccctgcgggacggcaagctgtacaacaacaagaccggcgcccatgtggcggccctgggcgtggtgcacgtctttggcaatatggccgacatgccccgcctgctggacattgccaaacgctacggcctgatcctcattgaggacgccaccgaggccctgggcacccattacatttccggccccatggcaggcaagttcgccggcaccatgggcgacgcgggctgttacagcttcaacggcaacaagatcatcaccaccggcgccggcggcatgatggtctccaaccatgccgactgggctgagcacgccaaacatctgtccacccaggccaaggccgaccttctgcagttcgtccatgacgaggtgggctacaactaccgcatgaccaacgtccaggccaccctgggtatcgtccagctggaccgtctggaggacttcatctccgtcaagaaggcccggtatgagcagtacgtggacggactggacggcaaaaaaggcctgcgtatcctgcctttccgggacgaagcccagggcgtgcgtcccaaccggtggttcttcagcctgtatctgggcgagagcgatctggaccgggataccgtcattgaaaagctgcaggcccaggatatccagacccgcccggtgtgggcgctcatccacgagcaggccgactatcccaaaaacgaggcctatgccctggacaaggccctggattaccgcaaacacatcgtcaacctgccctgctccaccgacctgaccgagcgggactgcgcccgcgtcatcgacgcagtgctggcgctgtaaggcgctgatcccgggtatcgtacccgacccaaaaggaggttgacccgccttgctcaaggtagaggaactgttcattgacgaaaacgccaccgtgctggacagcatgaaaaaactggacgagaccggccagcgcatcctgttcattgccccggagggcaaactgcaggccgtggtcaccgatggcgacctgcgcaagtttcttttgcgcggcggcacgctggaccagccggtgtcccaggctgccaactaccatcccaaaagcctgaccgtgtccgagcgcggccgcgcccgccgtctgatgaaggattgcagcatcgatgcggtgcccatcctggacctgaaaggctgcatcaccgacatcgtctttgcccacgggctggacatcgacaaccgcaaacaggcgcccatccctgtggtcatcatggcgggcgggctggggacccggctgtacccctacaccaaaattttgcccaagcccctcatcccggtgggagagcatcccattgccgagctcatcatcgaccggttccgggatttcggctgccgtaagttcaccatgatcgtcaactacaaaaagaacatgatcaagtcctattttggcgatctggagaccgactacaccgtggactttgccgacgaggaagtctttatgggcaccggcggcgggctttgcctgctcaagggccgcatggattccaccttcttcttcaccaactgcgacgtgcttttggatgtggatttcggcgatatctacgcctaccacaagcgccagggcaatctcatcaccatggtctgcgccttcaagcattacaccgtgccttacggcgtggtggagcttggccccgacgggggcatcgccgccatgaaggaaaagccggagctgaatttcctgaccaataccggcgtctacgtggtggagccccgggtggtggaggagatgaacgacggggagaagatcggtttccccgacgtgatcgagcgctaccgcgccgccggagaaaaggtcggcgtctaccccatcagtgaaagttcctggatggacatgggccagatggaggaactggaaaaaatgcgccgcaagctggaagagcaggcgtaacaggagtttgataaggaggctgcacatgcccgtcaccatcattgccgaagccggtgtcaaccacaacggcgatctggaaatggcaaaaaaaatggccctgaccgccaaggaatgcggggccgacatcgtcaagtatcagaccgccgtgcctgagctggtggtcagccgctttgccgagaaggccgagtaccagaaacagaccaccgatgccgccgaaagccagctggaaatgatccgcaagctgcatttttcctttgagggccaccgggaattgaaggaatactgcgacgagatcggcatccagtacctttccgcgcccttcgatattcccagcgtgcggtttctgggaacgctgggtctgcccctgatcaaaattccctcgggggagatcaccaacctgccttatctggaggaggttgccaaactcaagactccggtgctgctgtccaccggcatgagcaccctgaacgagatcaccgacgccctgggcatcctggacgacaacggctgccccgaggccaccgtgctccactgcaacacccagtaccccaccccctacgaggacgccaacctgtccgccatgctggaactgtttgaccagttcggcctgccggtgggtctgtccgaccacaccccgggctgggagtgcgacgtagccgccaccgtgctgggcgccaccgtcattgagaagcactttaccctggacaagtccctgcccggtcccgaccagaaagccagcctggaccccgccgagttcaaggccatggtggacgcggtccgccatgtggaggctgccctgggtgacggccgcaagcacgtgactgccagcgaggcccccaacaagccggtggcccgcaagagcatcgtggcggccagggccatccatgcgggagaagaattcaccgccgacaacctgaccaccaagcgtcccggcgacggcatcagccccatgcgctggtacgaggtcctgggcaagaccgccaagcgggattttgccgaggatgaaaaaatcgagctgtaaatagcattcaccgcgcgggggatgcggcttttttgccgccttcccgcgcattttgcaaagtatgcggaggggtttgtatgtccacggtcgccgttgtcaccgccacccgggcggaatacggccttttgcgccccgtcattcagcggctggcaggcgggcagggtcccggcctgcgcctggtggtgaccggggcgcatctctgtgcccggctgggggcgacggtcagcgagatcgaagccgacggcctgcccatcgacgcccggctgcccatcttctccgacgacccggaggagccggtggcccgcaccatcgcccgcaccatgacggtgtttgacgactattttgccgcccgccgccccgacggcgtgctgctgctgggcgaccggtttgaaatttttgccgtggcggctgccgcggcggcccggcacatccccatcgcccacatttccggcggggacgtgaccctgggcgcggcggacgaatactaccgccactgcatcaccaagatggccgccctgcattttccctcctgcgccgacagcgccgcccgcctggtccgcatgggggaggaaccggcccgggtcttttgcgtgggcgggctgggggaccagaacatccgcaccctgcccaaaatgacccggcaggaattgtgcgaatccaccggttttgacctgatgcagccctttgggctggtgactttccatcccgagacgggggcgggtgcgcccgaccccgccgaacagtcggcagcgctctgccaggccatggaggcggtggagggtgtattctggctcatcaccggctccaacgccgacgccgggggcgaggtctgctccgccgccatgcgcgcctttgccgccgcccaccctgaccgggcgggctttgtgcagagcctgggcctcaaacgctacctttccgccatggagtacgccgccctggtggcgggcaattccagttccggcgtggtggagaccccctcctttggggtgcctgccgtcaacatcggcagccgccaggcggggcgcatccagtgcgccaacgtcctgtcctgcggcggcgacgccggggagatcgaggccgccctgcgccgggcgctctccccggaatttgccgccctggccaggaccgcccgcagcccctacaatggcggcgacaccgcgggcaagatcgtccgggtgctggacgcccgtctggggaccccggccatggaacaggccaagaccttctacgacggatcggtccccgcctttgacccgctggacgagccggtcctgtgatttttccttttgtgaggctttcctatggctgtttccatgctggaagaaaaaaccgccacctccccgcggggcaccacccactactgggtgagcaagcccgccgcggccgccggcccggccctggtgtttctgccggggctgaccgccgaccaccggctgtttgaggggcaggtggcccactttgcggggcggtatcccttgctggtctgggacgcacccggccacggcaaatcccgcccttacgccgatttcacctacgaaaaccacgcccgggagctggagtccattctggacgccgagagcctttcccgggtggtgctggtggggcagagcgccgggggctttaccgcccagctgctcatcgcccgccgccccgacctggccgccgggctgttcaccatcggctcctgcccctgcgacccggtctattacagcgcgtccgaccggttctggctgaaccagaccgaatggatgctgcgggccttccccgacaaaaccctgcgccgggccatggcccgcgcctgcggcgccaccgaagccgcccggcagcggatgctggacatgctttccccctacgacaaaaaggaactctgccgcctgatggccctgggctttgcgggttttgtgccggaaatgcgggcggtggacattccctgcccggtctggctcaccgtgggggagtatgacaaaaccggcaaggtccgccaatacaacgaagcctggtccaggcggacgggctatcccctgcacatcattcccggcgcggcccacaatgccaacgacgaccggccggaactcatcaacaatctgctggaacggtttttgccgcaactctgaccccggctccgccggggagaaaggaccctgtcatgaaacttctcatcgtcggtctgggcagcatgggcaagcgccgcgcgcgccttgcccggggcctggacaaggagatccgcatcgccggtgtggacaccacccaatcccgccgggaggaagccgtcagcctgggactggccgacgccgcttacccctccatcggggaggccgtagcggactttgcccccgacgccgccctggtctgcaccgctcccctgtcccacgcggcggtcatcggggaactgctggatgcaaacctccccgtattcaccgagctgaacctggtctccgacggctacgccgagaacatagccaaggccaaggagcggggtcttgtcctgtttttgtcctccaccatgctctaccgccgggagacccagtatatcaaggaacagactgccgctttcggcaagccggtgcattacatctaccacatcggccagtatctgcccgactggcacccctgggagaactacaaaaacttcttcgtgggcaacgcccgcaccggcggcgtgcgggagatcctgggcatcgacctgccctggctgctggacgccttcggcccggtggaacacctgaccgttcagtgcgacagcatcagcgagctgggtctgccttaccccgactgcgccaccctgatgctgcgccatgcttccggcgttcagggcgtgctggccgccgacgtggtcagccccaaggcggtgcgcaactttgaatgcttcggcgacggactgcacctgttctgggagggcaaccccaaggccctttaccgctttgccgacggcgacaagcagtttgtggacacctacggcgatttcacccacgatccgcggtacagcgacaacattgtggaaaacgcctacgtggacgagctggccaatttctttgccgtgctcaaaggggaggaagccccccgctggagctttgagaaagacctggatgccatccgcatcatggaccaggtccaggctgccggacaggcataattttttccgggaggggatcatcccatgcaaacgctttccgcgctcttcatcggccttgggtccatcggcacccggcatctgaaaaacctgcacgccatctgcgcaaaacggggcatccggctggaggccgacgccctgcgcagcgatttgtcccgccccctgcgccccggcgtggaggaactgctccgcgcccagtacaccgactcggcggccctgggacagtacgacctggcctttattaccaaccccaccagcctgcacgccgatgccctcaaggacatctacggcaaggcgggggcgctgtttattgaaaagcccatcttctccgccgagcagacggggctggacccggccgatctgattcctgccgggcagaaagcctacgtggccgcacccatgcgctggtgcggcgccatgctggcactgaaggaactgctgcccactctgcggccctactgcgcccgggtgatctgctcctcctatctgccggactggcggccgggggtggactaccgcacggtatacagcgctcaccgggcgctggggggcggggtcaccatcgacctgatccacgagtgggattacctggtggacctgttcggcacgccggaggaggtccgcaacttcaaggggacctactccgagctggaactggactccgacgatctgtcggtatacattgcccggtggccccaaatgctggccgaggtccatctggactacttcggccggggataccgccgcagcattgaactgttctgccgcgatggcagcgtggtggcggatttcggcgcaggcaccctgaccttgcccgacggcacggtgcagtcctacgccgaggacgtgaacgaacgctacctgcgggagatggattattttgtggggtatgccctcggggacaagaccgagagcctgaactcgcctgccacggcctgccgtgtgctcaaactgacattgggggaactggtatgaaagaacgtctgttgatctctgtctgcggccgcgcgggcagcaaaggctttgccaacaagaacctgaaaaatttctgcgggcatccgctggtctactacaccctgagcgccgccgagctgttcgccaaggcccacccggaagtggcggtggacattgccctgaacaccgactccgacctgctggcggagctggtggcgaaagaataccccgaggtcgtctacctgtcccggggtgaggaactgggcggggactcggtgcccaaaatgcgggtgttccaggacaccctggcccgcatggaggagcgcaccggcgcaccctatgactatctgatggacctggacatcaccagtcccctgcgcaccgccgccgacgtggagaacgccgtggccaaaaagcgcagccgccccgacctggacctggtgttcagcgtcaccgaggcccggcgcaatccctggttcaacatggtcaaggatgccggcgaccacgtggagcaggtcatccacagtcccttcaccgcccggcagcaggcccctgccgtctacgacgtcaacgcctccatctatgtgttcaagcgggatttcctggccaacaacaccgacggtatgctgtggagcggcaagatcggcgtgtcggtgatgatggacaccggcatcatcgacattgactccgaggccgactacctgctcatggaagccatcggcgcgcacctgtacgcccacaagccagagtttgccgccgtgcgcgacaacatccgcggatgaccccacgcaccggagcggcggaacgccgccgcaccctgcggttcagtctgctgttcagcctgggggtattgctggccctgtacctggcgggcgggtggcggccctacgtcaacgcccctgccgggttccattacggcatcaacagccccctggatgctctgacactgctgctgccccccgggtggcgagtgctgacccagcaggggcttctgatcctgcgcgccacggcggcagggagcgtcatgtgctggtatctgatgcggcattacggctgcgtcagccggctgtttgcccccatgtgtgccgggtatgcggcagcggtctacaccggctgcatcatcaacctggtctgggtggatgccgccaccctgctgcccctcatgctggacgccgccgacgttgttctgaacaccgggcggctgcgcaggctgttcgtgctgacctttgtctgtgtggcggtcaactgctacactgcctggccgctgtgtctgtactgcctgttctatatcatctggcagtttttgcgccgccccgggcggatggactggcccggctttgccaaagcggtgtggaacggcgtcaaggccatgctgcccgggctgcttgcggcctttctgctgctgtcccccgtcatctgggcgcagtatcagagcgacgccttccatctggcaacttcgggggaggagttcggctttgcccccatggagctgatctactgcctgtttttcgggcggtattcctccgcctgcgccgccgcgggcatgccgtatctgtacatcggcagcatcgtcctcatgctggcgctgctctactttatgggcaacgactccacccgcgccaagtttgcgggcgcttttctgctggcaggggtgggcgccagctatctggtcaacctgcccggcctgacctggcagaacggggacgacctggcggtctttcctttccggtacgggtttctgctcagtgccatgctgctgatcctggcagcggataccgtcattcatgatccgccgcccatctcgtccctggcagcggccatgttcgtgctggccatctacctgctgggctaccacggcacggtgggcgcagcggcacggacctggcgtctggccatcgggggcgggctgtatctggcctgctgtcccctgctgcggatgcgggcgcagccctcccagcggagggccgccggtatcctgctggccgtgctgatgcttgccgatgcggtggtcagcagctgcatcacattgtatggagtatttttatggatatgaattccccggaaacacagcgccgggccatgcatctggtcatggacaccggcaagctgcttttggaaaacggcggcgaggtttttcgcgtccagcagaccatgctgatcatggcctccagcctgggcattgaggacttcaatacctatgtggtgaccaacggtatttttgcttcggccaacgactgcaatgaggtgcggcacattccctcggtgtccattcacctggcccgggtggaggcactgaacgagctgtcccgggaactggctgccgggaccctggatctggagggtgccgagcagcagctggacaccatccgcgccatgcctgcccggcgtcctgccgtcatcatcgcggcagcggcagcgggcagcgcctgtttcggttacctgttcggcggcggcctgcccgaaacgctgggcgcgctggccgccggcacggtggagagcatcctggtccagctgtgccgacgctggcatatcagccgcattttctccgacatcatcgcagcagcggcaggcactgcggtggccctgctgtgccgggccatctggccgcccctggacgccaacatcaccaccatcggcgctctgatggttctgacccccggtgtttccctggccatgggcatccgggacatcatcaacgccgactacctgtccggcgccatccggctgctggacgcggtgctggtggcaggatgtctggcaggcggcgtcgtgctgacctacattgcggcgctggccatctggggggtgaccatatgagaaatccgctctttcagtttgtggtggcggcctttgccaccatctttttcggcgtgacgttccaggtcccccggcggcatttcgtggcctgcggcatcgtgggcgcggtgggctgggtgacttacctgctctgccatgacgtggccggtttttccgcccccaccgcaacgctggtggcggtgctgcccctggccgccctctgccgcctgttcgccatccggttccgcgccccggtgacgttgttcctgctgtgcggcattttccctctggtccccggcgccggcatctactacaccgcctactactttttgcaggacgaaggcgccctgtgtgccgagcgcggtttcgagactctgaaaatcgccctggccatcgctttcggcattgccctggtctcggccctgcccttgccccgccaccgccgcctgccctccaaaaaataagcacaaaaataccgcccgcatctctcacaaggagggatgcgggcggttttgtctgttgttactgctccggcgggatgacaaaggcaatgcctgccgcggaaggtccgatgtgggtgccgatgaccgagccgatctggctgaaatggccgccctccagcttgaggttattgcgcacatagtgctggatggggcccagcacctgcttgtcgctggaatagaccatgacgaagtcatagcgggtatccacgccgcccatcttgtccatctgcttgaacagggcaacgtaggcgccggggcggccgcgggccttgtcggccagatggaccgcgccgtcatacaccgacagcaccggcttgatacccagcgcgccgcccaccagggcaacggcagcgggcagacggccacccttgtgcaggtgcttgaggctgtccaccacggccaggatgcggatgcgctttttcagcagatccagcgccgcggcgatctcggcagcgctgacgccctcgtcacgcaggcggacggcctcacggatgaggatgtactcgccgggggaggcggtatcggaatccacaaagtaggcgtcgttgaattcgcattcctccgccgccatcttggcgcactggaaggtgcccgacagcttggaggagatcaggatgaccaccacttcgtcaccagcggccttggcttcctcaaagacttccataaaggcttcgggggagggctggctggtgcggggcagcttgtcggctttctgcagccggtcgtagaagtccgcgcgggtcatatcgatgccgtcgcggatggtctcgccgtcctcaaacaggacgttgaggggaacaatatgcagccccgggatcgcggctgcatcgcctgcggtcaggtcggcggcggaatcagtcaggatacggatcatggcagacacctcttgtcatgtagggcgcggggatgccgcgcctgggctttcgatcatggaatagatcaattattttatatattaccacattttccgcaaatgtcaaaaatcagacagttgtgcaagcgcctgccgatgcaccgccgtgcccgtcagtgggtacggacaaagagggccagcaggttgaccacaccgctcacaataagggaaatgccgatcagtcgcatcatcatggcggtggaagccaccggagcgaacagagcggccaggcccagcagcaggcagacgatgcccacgatcaggggcagccaccacaggctgtcgccccagcgctggcgctgaatggcgttctgaacgctgttgacgccctccaccagcaggaaaacgcagatgatcatgcccacgatctccaccagaatggtggggcgggtgacgatgaacaggcccagcaccgcacctgccacgctcaggggcaggaagggatcgctgagcagggtggcacggcggaaggctgccgcgctgatgatgcccgccacgcccgaaagcaaaatcagccagccgatcagggaacagatggccccggtagcgctccagggacgggccaccagataaccgcccagcacgatgccgaccaccggcatgataatctggtcaaaacgaatgttcatacggttcatattttaccatcctttcgcgcggggtcccgcgcaggtcgttgtgtacctatagtatagcacagtcgggcggcggcgtctttggttatccgcgggaatccgtacaattttttcagctctgcatgtcactgtcgccccggcggcgcaggcgcggcgcagcaacagcagcgggggctgcggcagcctccggggcaggcatgggcgcgttctccggggcggatgccgcggcacgagaagtctcttcccggatcacgggctgtaccgcatccgccaggcccagcaggtcctcggcctcgccggggtccagctgctgcacctgttccagcttgcgggtgatggcccggctgcgggtgccgatgagctcctccaggtcgctgccggtctggttcaggtggcgctgcatggcctgcaggccggcgccgaacttttcaaactcggtcttgaccgcgcccagcaccgtccagacctcgccggagcgcttctggatggccagggtgcggaagcccatctgcaaagcgttgagcaatgccgccatggtggaggggcccgccacgctgatctggtaatcccgctggagggcctcggtcacgccgctgctgaccacctcagcatacaggccctcaaagggcagaaacagcacgccgaagttggtggtgtaggggacctcgatatatttgtcgtggatgtccttggcctcctggcgcagcacggtgtccagccgcttggctgccgccgccaccgccgccgcatcgccggactcccgcgccgcctgcagctgggcgtaggtatcgccggggaacttggcgtcaatgggcaggtagacggtgccgtcccgcccgggcagttttaccgcgaactccacccggttggtgctgcccggcacggtggccacgttttcctcgtactggccgggggccaggatctcctgcaaaatggcccccagctggacctcgcccaggatgccccgggtcttgacgccgctgagcacctgtttcaggctgcccacgtcggcggccagggtctgcatctcgcccaggcccttgtacacctgttccagctggctgctgacggtgcggaaggactcggaaatgcgcttttgcagggtatcctgcaatttttcctccaccgtgccgcggatctcgtccagcttgcggttgttgtcggtgcggatggcgttcatgccctggatcatggccccccgcaccccgtccagacgggcggcattggagtcctccaggtttttcaggcgggtctccagcatggcaagctgggccaccaccgcgtcgttggcggccttctggcgggcagcgcctgcccggtcgatgctctccagccgggcggtggaggccgacgccccctggcgctggttttccgccagcatggcgcccaaatcccgcagggaggacacggtggtccggccgatctccccctgcatggcgcgcatctggtcggccaggacctcggtctcctgctccaccgtgtcctgcacagtccgcagcagatcctcccggtcgtcctcccgctcccggtggcggtaaagccgcaccagagcggcggccagcatcacgtcccccgccacggccagtaccagcaggatcacaagcatcgtttccatcaaagtttatcctcctccggggcgcagacggccccgtctttccagagatccggcagcgagcgctgcggataaatcgaatggtttccgttgcaggcataggccacaacgctcaccaggaaaaagcagccgaaatactggccgccgaacagttccatacccaccagcaccggggcgaccagggtattggtccccgccccgaacaccgccgcgtaggccagggccgcgcacaaaggcatgggcaggcccagaaagccgcccagcaccgcccccagggctgcgcccacggcaaacagcggggcgacctcgccgccctgatagcccgccgccaggcagagggcggtcagcgccagcttgaagaaccagtcccaggcatagagggattcccccgccagagcggcattgaccaggcccgtgctcaaaccgttgtagcgccccgccgtcagcaggccgaacaccgccacaacggcacccaccagcacaatgcgcaggtaggcgttgggcagcagtttacccagccggtcccgcaggccgtggagcagaaaaacgaacagccgtcccgccaggccgctggccacgcccagcaccagcagggcccccagggtggggaaggtcagttccggcaccgcacaggtcagcagcacgccgcccttggcaaggcccagcgccccgctgaccgcactggcaacaaaggcggccaccgcggtgggcagaagggcggcatactccatcatgcccacatggaacagctccatggcgaaaaagatggccgccaccggcgtgcggaacagccccgcaaagcccgcggccaccgccgccatcaaaagatgccgtcttgcccgggcatcggacaggcggggcatgagcagcccggccgccgaggcagtgatctgcaccgctactccttcccggcccacgctgccgccaaacagatgggtgatccaggtggcaatgaccgccatggggatgagccggaccggaacgtggtcccggcgggcgtcggccgtctcaaagacaaggcccatgccccggcggcagtccccgccgaaccggtcgtagcaaaagcagatcagcgcaccgcccgcgggcagcaacagcatgagcagcggctgtgcctcccgcaccgacgtacagaataaaattccctggccgaacacggcgtccatcacgcctgccatcacacccacaacagccgaacaagccaggagcagcgtactgccgcccatggcgtaaaatttttcccgcatgatacagtgttccccctcgtgtctgcccgggccgcatccccgggcagttacctgtttaatgatagcacagcagccaccggcgggcaaccgtgatgcacggccgtacaaaagaaaaccgcacaaaatattttacaagggaaaaaggtcgctgcgaccgtgattgcgcccaaaaacactccgctgtgccttgacttgaactgtacatattgttaaaataaaaataacccgcccgggatgtatggatgttccgggcagacattcccgccccgtcacagcccggctttggcggggcgttttctaaggaggcgcccatgcgcactcagacacccggttcccgagacccgcacagccttgcgctgtatcaggccatcctccgcctggataatctggaggactgcatccgcttttttgacgatctctgcgccgtgaccgagctgcgcgccctggagcagcggtacgacgtggcaggctgcctgctgcaaggcaaagtctatgccgagatccgccgggagaccggtgcgtccagcgccaccgtttcccgcatcaaccgcatgctcaactacggcaccggcgccgtggccgacagtgtccgctacgacctggaacacgccgacgacgcccagaaagatcaggccccggccgaggactgatcttccccatccctgaccggccaaccatacgagtaagcacgcggcgtccccgccgcaagaggaggtatcccggatgtctgtcacgatttccgatttcggccgtgccaccgacggcacgccggtaaaaaaggctgttctgaaaaacgataagctggaagtccatatcctcagctatgccgcgatcatccaccgcatcctggtggcggaccgtcacggcaaaacggtggatgtggtcctggggtatcccaccgtccaggactacgagctgaactccggcgacgccatgggcgccgtggtgggccgttttgccaaccgcatcggcggggcgcggttctacctgtatgagcaggaataccacgtcacccccaaccagctgggcaactgcctgcacagcggcctgcacggcttcaaccggaccgtctttgccatggacgccatccccggagaggataccgtcagcctgacggcggaaagccccgacggcaccgacggtttccccggcaccatgcagctggaggtccagtattccctggcaggcagcggcctggtcattcggtactatgccaccaccgatgcgcccaccgtggtcaacatcaccaaccacagctacttcaacctcaacggccatgcttccggcagtgtgctggggcatcgcctttccatggagagcaacgcctatctggagaccgacgacgccagcatccccaccggccgccgtgttcccgtggccggcacccccatggacttcaatgaggagaagaccatcggccgggacatcggggcaaactacccggcacttttgcagggcaagggctacgaccactgctacatcctgcccgacaccggcctgcgccacgcggcctggctggtcggacccgagaccggcatccgcatggagacgctgaccacccagccgggcgtgcaggtgtattcggccaacttcctgaatcccggcaccgactgcaaggacggcgcgcactattctccccgggatgccgtctgtctggagacccagaacttccccgacagccccaaccaccccgatttccccaacgccaccctgctgcccaaacagacttacgacgagacgacggtctacaaattcgacattgcaccgctgtaacactcgtttctctgcataccatgacaaaaaccgccttccccggctggggaaggcggtttttgcgtgacaggaaggctatggaagccaatgaaaaaagcgtcagttgacagagtccggcgtccagagatacagccggccgctgtacggggcgggagacacggcaaggcagttccttgcgtcggtggtcagggtgcagtcctcccggggcgtcccgccgccgaagcactgccagtcgctgtccagcagcagccgggcctgaccggggccgggcatggccagaagataatcccggggcgggcagtccccgaagcagaacaccccgaacacccggctctcccgtccggtgcgaagcatggcaaagacgcactgtcccgccgcgtcgcagtccagccagcggaaccgttccgggtcgtactctccctgccagaaggcgtcataccggcggtacagccccgccagctcctgccggaaatggcggaaagcgtcgtggttggggtaacgcagcagttcccagtcctgggcgcgggcttcatcccactcccgcagctggccgaactcgttgcccataaagtccagcatcttgcccggatgcaccgtcatatacaggtagagcgcccggccctgggggaatttgccctcgtaatcgccgtacatcttttgcaggatggtggccttgccgtggacgttctcgtcgtgggagaagggcaggatataatgttcattatagaaatacatcatggagaaggtcagcctgccctggttttcccggcgctcgtcgggggtctttttgaaatagtccagggtgtcgttcatccagcccaggtcccacttgtagtcaaagcccaggccgccgtactccaccggcgccgtgaccttgggatagttggtgctgtcctccgcaatgagcatggcggtggggtggcggctttgcagcccggcgttcatggtcttgaggaattccagcgtgctgccgttgacgccccgggcggggtcgccctgccagtagatcaggcggctgaccgcatccatccgcaggccgtcggcgtggaaataccgcagccagtagtcggcgcaggactgtacaaagcagcggatctctccccgggagtgcatgaagttgcagctgccccactcgctctctcccaccgcgtcggcgggatactcatacagcggggtgccgtcaaaccggcgcaggccataggcgtccaccgcaaaatgcaccggcacaaagtccaggatgacccccacgccctcccgatgacaggcgtcgatcaggcggcagaggccctccggcgtgccgtaacggctggtaggcgcgtaaaatcccgtgatctggtagccccagcttccgtcaaagggatgttccgccaacggcatgagctcaatatgggtgtagccgttctcccgggcataggcgggcagtcgctcggccagctggtcgtagctcagccagctgccgtcctccgccctctgccagcttccggcgtggacttcgtaaatattcagaggactgtcaaagtttttggtgcggcgggccatccactccccgtcggtgaaggggtagtccggcagtcccgccacaatgctgcggccgtcggggcgcagggtcatggcaaagccgtaagggtcgcagtggtccaccaccgcgccgtccgccccggtgacgcggtagctgtacgccatgccccgcactgcaccggggacaaagccctcccacacgccgctgatgctgccgctgcgttgcagggaggtctcggtctcagaccagtcccccaccacgctcaccgcccgggcggagggcgcccacacggcaaagcgggtgccctccggccccgggtgtgcccccaggacggtgtaggcatcaaaggcatgaccggtataaaaatcctgtgtgatcataacatcgctccttggccggcgggccgtctcccctgcccccctttgctggacagcgggcagggctgtatactataattacagtatacagggtgtccaaaaacagggccaccgtcagcttacgccaagtgttggttatccgacatctggtacaatgtgttggggaagatgtgctatggatctgcgggcgcaaaaaacacaaaagagcatcaccgatgcctttttccggctgcgggcgcacaagccgctggaaaagatcacggtgcgggaactctgccgggaggccccggtgaaccgctccaccttttacgcctactacaaggacgtgtacgatctgtcggagcatctggaaaacgagctggtgcgctccatcgtggcgggactgccccaccccgaggcggttctcaccgataccgcccgctttacccaggatctgttccgggcctgtgcgccccatccccagctggcggtgctgttttccggcagccggcggggacttttgatcgcccggttttccgccgagctgaagcggctgatcttcgacctgtaccccgagcgccggggggaccccgagtttgaagtctccctgagtttccgcatttacggcgcctactacgcctttctggaaaaccgccagtacggcgaggagaaagtagtgggcattctggggcggttgtcctcggtggagactttctgaactccaacattcctgcatacagaaacgccccgcggcgtccggcaaaggaccccgcggggcgttgtttgttataacagggtgcgttacagatgcaggaccacccgggcaatgttgaagtagaccagcagggtggtggtatccacgatggtggtgatgaggggggacgccatgaccgccgggtcaatgccgatgcggttggcggtgacgggcagcagcgcgcccagcagctgagagatcagcacggtcatgaccagcgtcaggcagacgacggccgccaccggcacggcaatgtggtcaaagaccagcagcttgacgaagttgcagatggccagcgtgccgccgcagaggatggcgacgcggaactcccgccagaggacgcggggcaggtccttgccgtggatctcccccagggcgatgccgcggatgatggtggaggtgctctggctgccggcgttgccgccggtatcggtcagcatggggatgtaggcggtgagcaccgtcacggcggccagggcatcctcgtaactgcggatgaccaggctggagaaggtggcgctgaccatcaggaacagcagccagggggcgcggctcttgtacaggtcccacatgctgcgccggaaatagggcttgtcggtgggggccatggcggacatcttggcgatgtcctcgtcggcctcgtcctgcaggatggagatagcgtcgtccaccgtgacgatacccacaaggcgggtctccccgtccacaacgggcaccgccagcaggccgtacttttcaaacagatgggaggtctgctcctggtcggtggaagtggtgacgctgaccacattggtgtccatgaagtcatcaatgcggcggtcctcatccttttccagaaccagcgaccgcagggacaccacgcctaccagcgtgcggtcgggcatggtgacgtagcagttgttgatggtctctttgtcgatgccgtttttgcggatggactccatggcctgccggacggtcatgtcggggcgcagctccatgaactcggtggtcatgacgccgccggcggaatcctcggggtatttgagcagctcgttgatcatcttgcgggtatcgggcgccgcctgggccagaatgcgcttgaccacgccggcgggcatttcctccaccaggtcggttgcgtcgtccacgaacagctcgtcgatgaccagcttgagttcccggtcggacaggccgcggatcagggcttcctgggtctcgggggtcagctcggcaaagacctcggcggccaggtccttgggcatcagccggaacaggaccggcattttctcctggggcagatcctcgaacacggcggccaggtcaggcgcgttgagggtctccattacatcccgcaggctctggtactttttggcgtcatccagatgcgccagcatgtttttgagggtctggattgcagtatcggacatttgggttgcctccttttttcgggcagccggtgttccgatgcgcatacgccacacacagccctctcacaggcggcgggtccgcccgcaggaaggcataaagaaagcgcgcgtcatgcggtgcagacgcgcgccaaacaagcaggccgacaggtcacgggatcgcccgactgccctgtccgtctgtcttttgcgcatatgcacccaaacatcggttgccatattttgttccatcggttcactggactaccgggaatctccatgccgtaccacctgcctttacattgtcagatttattttcgggtatgacacccgtacatggttatcgtaccatcccaccgccgtcaagtcaaggcaaaaagcgggccttttccaaacattttttgacgagtgtcaaaagtcgggcccggttgcaatacacgggcaaatccgatacaataaagctgccgtgataaaccaccggaacggccctgcgcggccccatgaaaggaagtttttgccgatgatcaaaggcgttatttttgatatggacggcctgatgttcgataccgagcgcatctggacgaccctgtgggctccggccacggaaaagctgggcctgcccgccccctgtgaggagtttgtctccggtgcacggggattggccggagaaaacatgctacggcatctgcggcgtttctatccccagtgcgatcccaacgtcctgttggccgccgtgcgggcggagggcaagaccgcccttgccaacggcgcccccgccaagccgggactgtttgccctgctggactacctggaggagcagaacatcccccgcattgtggcaagttccagctcccacgagaccattgagcggtatctgcgcatttccggggcggaccggtattttaccgataccgtatgcggcgacgacgccagcgcgtccaaacccgacccggccatcttcctggtggcggcgcagcacctgggcctgcccgccagcgactgcctggtgctggaggacagcttcaacggagtgcgtgccggacatgcttccggcgcggtgacggtcatggtgccggatctgcagcagcctacggaggaaattctctccctgtgcgacgcctgctgcaaggatctgaacgaggtccttgaccgtatgcgcaatggcggcgagacccccttcccccgcaaaaaggactgctgaacgtccgattccggcatttcttgttttgggcggcaaattgacccgaattttgcaaaaatattttgaagaaatgcttgacattgactcccccctgtggtattatacttcttgcagtcgcgctggtagctcagctggatagagtgtctgactacgaatcagaaggccaggggttcgagtccctttcagcgcaccaaagataaaagctctacggaaacgtagggctttttctttttttgtttgttctcgagttgcctcggaaagggacgtgaacagctgcgcaggcgaccgccgcctgcggcggaaacagggagccggagcaggggccgcggtcgcagaggacaagttccttccatggggcgccgtccgatgcgggcaccgcaacccgtaaggccggccggtttgcgtcccggccgggtccgacagtcctgcggactgtcggaaagtgcgcgggagagtccctttcagcgcaccaaagacaaaagctctacggaaacgtagggctttttcttttttgtctgttcccgggttgccgccacaacggccattcccgtttgtaaaaacacgaatcttgtacggtcaaggattgatgaaatggtacacaattttctttacaaggaatcgtgcacttcgtgtgttgccggggcgcggccgggacgatacaataaaagtatcttataatgagcagcagggagggcacgggatgaagctctggcatggcattgtgttgggtgtgatttttttcttccttggctatcagatagccggggtactgggcatcccgttggatgcacgcagcctggctttttccggtctgctcactctgcttgtggcggcggtgtttttgatgcgcctgcccgccgaccagcgccgctccctgttccgggtgcggcggcagctgctgccctggacgctggcactccttgcggggaaacttctgttttgtcagctctccatggtgctgtctgttttattcaactacgacggcggaagcagtaccgcgaccgatggcgtgctgccgttacagtttttgtctgtggccgtgttgggtcccatcagcgaggaactgatctaccgcggcggcctgacccagggtctttgcagaaagctgccctgggaagcgggcatcgtgatccctgcgctcctcttttccgtagggcatgcgtggcccatgtggccacagacctttctcaccgggctgctgctgggatacctgtgctggtacaccgggtccctcggatacggcatcctgatccacatgctgtacaatggcagcgccttcctgggcatcagcgcctatcccctgctcatgtggaaccgtaccgcaggcatgatactgtcgctgctgatcgtggccatcggactggcgctgactctctgggctctgcggggcttcacccgctgcgccgaccggctcgaggccgccgggtgatagagggaaaaccggccatattctttacagtatgctatactaatggaaccgtatcgcaaagaagccccgcagaaaggatgaatcccatgtgccataccacagatgacaaggaccatctccgggaagctcccgcccaaaaatcctctgacgggaacggcggctccgctgcccacgctccggtccccgccgacggcacccgggcaacgcgggaactttcggagtctcctgccatgagggccaaactcctggacggaatgggcgttccccttaaagactgcctgccggaggacgaagtcacctggtaaaccgcaagccactttgcagaacagcccgccaattcccgccctgcctccatcccggagtcatagtttcccgcggcgcctccccttttcctcacaaaaagcaaaaagcgcccccggcacagcaacggaaacagctgcgcggggggcgtttttctgttattgtttggatcaaagaccgcccaggtaggctttgcgcaccatatcggaattcaacagcgcctgcgccgtatccgaaagaacgatgcggcccgtttccagcacgtaggcacggtcggaatgccgcagcgccacgcgggcgttctgttccaccagaagaatggtggtgcccatgtcacggatcttgtcgatcatatcaaagatttccttgatgaccaggggcgccaggccaaggctgggctcgtccagaagcagcaggcggggttttgccatcatggcgcggccgactgccagcatctgctgttcgccgccggacagcgtacccgcgatctgcttgcggcggtcacgcagtttggggaacagctggaacacctgctccatggtttccgggatctcctgatccgggcgggtatacgcacccatgcggaggttatcctcgaccgagaaccgcgggaacacctgacggccttccggcgaaaggatgatgctcttctgcaccatgacgcgggtatctttattggtgatatcctcgccattgaagaagatttttccgccatcgcagtgcttcaggcccatgatcgtgcgcatggtcgtgcttttgcctgcgccgttggagccgatcagcgttacgatctccccttcattgacttccaggttgatccccgagagcgcattgatgctgccgtagttcaccgtcacattttccagtttcagcagtgccatggctcattcctccttgcccagatatgcctcgatgaccaccgggtccgtccggacctcatccggtgtaccgctggatatcatgcagccgttgttcaaaacataaatacgctcgcagatgttcatgacaaacttcatgtcatgctcaatgagcaggatggtatatcccatctctttcagacggtatacgatctgacgcagttcctcggtctcctgctcgttcatgccggcggcgggctcgtccagaagcagcagcttcggccgtgtggccagtgcacgggcaatctccagcttgcgctgggaaccgtagggcaggctggtgcccatctcgaaccggtcctcgtaaaggccaagcaggcgaaggatggtatccgcttcccgcacgcagctggcgcgctcctccttctcctttttggtaaagaacacaccggagaaaatgttgcccttggtccgggtatgcatgcccacaatgacgttgtcctgcaccgtcatgcgggggaacaggcggatgttctggaacgtgcgggagaagcccagctcggtgatgcggtagggcttccagccggtgacgtcctgtcccagcatctccaccttgccctcggtggggttgtacatgccggtaatgacgttgaacagggtactcttgccggcgccgttgggaccgatgatgccgacgatttcgccggagttgacctccatgctgatgtcagacagagccaccagaccgccgaaacgctgagtgatgtgttctgttttcaaaattctctcactcattggcggcctccttgctcttttcgcggtgctccatgcgctggcggatatacttaaagttgatgtcgcccagcaggccctgcggcttgaccatcatcagcagcacaagcagcacgccgtagatcagctgacggtactgggccaggtcacgcagcgcttcgggcaggatggacagcgagatggcgccgataaagctgcctaccgtattgcccaggccgccgaagatcaccatgaccagcatatcgttggactgtgcggcagcaaagctgctggggtcgatgtagctggtgtaggtggcgtagaacgcgcccgccaggccgaccagcagggacgacaggataaagacgatcatcttgtagcggaacacgtggatgcccatggcctcggcggccagctcatcgtcacggatggccaggatggcgtaaccaacgcgggatttcatcaggttggagacgaccagagtggacagcgccaccagcacaaggatcatgaagtagaactgccggggggtggtgatctcgaagcccaggaaggagggcttggggatggccatgatgcccagcgggccgcgggtcaggctcatccagttcagttccaccacgcgcacgatctcacagaaaaccatggtgatgatggtaaagtagtatcccttgagcttcaagaccggcaggcccagcagcaggccgaacaggcccgccacaacaccggccaggatgaatgccacaaaaaacgggacatcataggtcgttgtcaaaatcgccgcggtatatgcgccgatgcccatgaacgccgcgtggccgaaggacatctggcccatgtaaccgaccatcaggttcaggctgagggtgatcatgacgtacatcaggcagacggtgccgatgcggataaaatacttggacgggaacacaaagggaaaggccacagctaccacacaggccaggatcagcagcggaacacgataccgaacaagtttttcacagaacttttccattacagcgtccgcctcctttacactttattgatctgtttgctaccaaacagtccgctgggcttgatgagaagcaccaggatcagcacgacaaacgaaatggcatcgcggtagccggagctgatatagcccgcggcaaaggtctcgatgacgccgaccaccaggccgcccaccatggcaccaggcagaacgccgacgccgcccaggatggccgaggcaaaggtcttcataccgatggaagcgcccatggtgatatccacggtctgatagtacatgcccaccaggttgccggaaatgcaggccaggacaccgctgatgatgaaggtgaaggcgatgacccggttgacgctgatgcccatcaggcgggcagcctccgcattctgggaggtgcagcgcatggccttgccaatcttggtcttgtagaccacaaaggagaggatcagcatcagcgtcagggcggtcgccagaatgatgatctggacccagctgatgacgacgctgccgatttcgatgcggccgaaatcaaagtggttggggaagggcttggtctcgctgccgaacgccagcatgatcgtgttgtcgatgatcatggacatgcccagcgttgtgataaggccggtcagtttgggggcctttttgttgcgcagccggcgcagggccagccggtccagcaggtagcccacgccgcctgtcaggatgatactgataaagaacgccaggaatgcgttcatgccggtcgccgaatagagcatcagcgacagatacgcgcccagcatgtacaaggagccattggcaaagttggtcagttccagaacgccgaacaccatggtaaagccgatggacaccaatgcgtaggtacttccgattgtaattccattgatcaactgctgaaaaaacactcgcatcaccgcctgtcaaacaaaagcgggagagccgatcttatgacctctctcccgcatgaatttttattccatcacttcacgcgaacgaactggccgtcctggatctcgaacaggtaaattcccttgaccatttctttctgctcgttgaacgacatattgtagccggaaacgccggggtaatcgcgcagggtcttgagctcctcgcgcagggccggggtatcggtgccaaccttggccaccgcatccagcacgatgttgaccgcgtcaaaggcgctggctgcgaaaccgtcggggacttcgttgtattctgcggtgtagctgtccacaaagttcttggaagcttcgtccagctcgccgctctccagaacggagggcaggaaggcgggaacgctgctcatgacgatggtgccgtcgatcttgttgccgacaacgtccaggaattcttcggtcagcagcatgccggggccaaccagctggcagtccatgttcagggccttggcctgcatgaagatctgagcgcagtcattgtaggaagcgttgacgtagaacagatccgggtcctgctccttgatcttggacagaaccggggagaagtccttggtctggccgggaacgaacgtctcggacatgatgaccttgccgccgtcggcttcgtactgcttggtaaagacatcggtggcgatgacgccgtggtcggtgttctgatacaggatcgccacgttctgagcgccgaacatctcgatgagcgcatccgcgaactcagcgccctcgtacttctggctcataacggcggagaacatgttctcgcccatggcggggaagtcggtgtgggaagcgttggggctgaagagcagcaggtctgcctcctcaaagacgggggccgccgccatggcgcaggagctggagaagctgcccatgcccgcgatgaccgtggggtcggaaacgatcaggttggcgacgttgacggcttccttcgggtcgcccttgtcgtccatgatctcgatgacgtagtcggtgccgttcttctcgttatactgcttgagggccagctcggcgccgcgggaaagggactcgccgtactgcatctggtcgcccgtcatgggaaggaagaacgccagcttgttcttttcggtaccggtggtctcaccggcggtgctgctctcgcttgcggtgccggtctcaccggtggaagaactgccggaggtggtattgccgctgcagccggccagcattgccagcgacatcgcggctgccagcgcgccgcccgccactttcaaaagcttctgacgtttcatgtgatatgtctccttttcacgtgattttttccgtatttttgcggggtaactctgccctgttcttcccccgtatttcttgatttcatcatacacacataatgtcattttgtcaactttatctcaacagtttctatacaaatgacaatatgtatttataaaaattgtgcactttatattatataatgtgggttttacggggttttcggggctttttccgccgcttttcaatttcattatgtaatgttttcgtttcttttgtttttgtgcgcggcatttctttgcccgatcaggatcacaataccggccaaaaataccagcacaccgcccgccgcagaagatagcgcggggacctgtcccaggaacagattgcccaggatcatggaaaacagaatgccggaatagttgaagatactcacctgcgccgccggggcatagacgtaggcctgggtgagggcgatctgccccacaaaggcgaacacaccgatgcagatcagccatgccagctcccgggcatcgggaactttgaactggggaagcatggcgattcccgacgcaatggtggagaacaacgagaagaaaaagacaatgacttcagggggctccctgtttttcagggcgccgatggcggtataggctacgcccgaaaacacagccgagaggaacgccaccgccaccgggaaccagtgggactggaaggtggggttggacaccagcagtgctcccccaaaggccagcccaagggctaccccctgataggcagtgaatttttctttcaggaacaggcacgccaggaccgtgaccacaaagggcgacattttgttgatgatggctacatcgccctgggcggcatggcccgaagcgtaaaacagtgcgaccattcccgcatagcccgccgccgaacggaacaccagcagaccgcggttttcccgcttgccaaaggctgccagattttttctgcgcagcgagacaaaggccgcgatgcaggcaaacaggttgcggaaaaacagctgctcaaacagcggtatcccctgcgccgtcttggcaatggcgatctgcattgccgaaaagcccagcgcggacagcaccatgagcagcgcgcccttgccgaaccggctcatgacgcatcgcctgcgatcatcacgtcgatgatgcgctcatcggtctcgaccatgcctttgccggcaatgtcgcccacgcccgccatggtggcctcgatgccgtccttgacgatgccgtcgcccggccggaaggaacatcccgccttggcaagctcgtatcccatcagggcggcgtccagggcggccgcgatcttggcagcacaggagggcttggcgccgtcgcacaggatgccggatacgttggccagggtattgctcaccgcctgggcgatgcgctcatcgtccgcaccgtccagccaggcaatgcccgcaatgctgcccgccgccgcgctcaccgcgccgcagtaggcggaaagccgcccgatgcgggtcttttggtgaatggccgtcaggttgctgatgaccagcgcccggatcagcttttcatggggaacgttccggtttttggcaaacacgatgaccggcagggacaccgtcatgccctggttgccggagccggaattgatgaccaccggcagcagcgaaccgctcatacgggcgtcggagcccgccgcggccgcggccttgatctgggtccacaggcccgtgccgcaggtctccagcagcattttgcccacattggagccgtagacatgggtcaggccgtcgttggagatggcctcattgcaggcgatctgacgctcgatgcagtcgcggactttctcaatgtccaccgtctcggcaaagcggagaatgtcggtcagccgcataaacgaacgatcggtgtagtgctcctgcagagactccgccgggcaggcgcggaaaatatcctcgccgtccttttcaatgcgcacaatgttggtgtggcggtctttgagttccgcgcgcaccacatggccgcctccgcacacctccacgatcatatgcagtttggcatcggttttcaggtgttccaccgtgcatttttccgggtgttccagaaactcctccgccattctgcaccggtccgcgggcattccggtcaaaacctccagctttttctccgggtcaccggccagggcgccgaacaccgccgcggtctcgatgcccctgcggccattggtccccggcaccaccacgctttttacgtttttaatgatgtttccgctggccaggacacggatgctctccgggtcggtgcccagggctttcctggcctgcgcgctgcaatacgcaagggcaatgggctcggtgcacccctgcgcggggaccagttcctcatgcagcacggcaaggtaagatcgttcatctatcatagcttttctccgacttttgattgtttcaggcattttttgcgttgtactcatccgcggccacgcgcagcagatggacggtttcctcgtcaatatccagaggcagagagcagccgggggcgaaaatcaggcggttgtccccggactcctgcgccgcccgctccactctgcggcggaaacggtccagcacctccgggcgggtgccgtaaaagtcatggaactggtccgtaccggtgatcaggatcttgtcggtgacggcgcggaccttggccacagtggagcgttcctcctcggggatctgctggggagcgttctcccagctgagggcctgcacgtcgtaggtcttgaactgatcccagaaaaagtttttggcgccgtggacatgcaccatattgaaccaggtgcgcccgtgggcccgggccagaagcatctcgtcatagggacggcagaagcgttcaaactcctgctcgctcagaatatcggcgttgctgtaccgctgggcgaagaagaagccgtccgcgcccgcctcgatataggcgtccaccagctgcagctcggtctgcaccagagcgcgcagcatggcgtccaccgcttccgggtgattgtccatgtaatagcgggcctgttcgatgccgccgcagaattccgggatgcagtgcgccggggtaaagatggtgggaatgaccggcaccgtcccctggtaatgcttcgccagcgcccggaccacgttgacctcacgctgatacaccgcgtttttcgagacgtccagcaccgggaatgcttccatgtccttcacgctgttgaccaggtaccggtggaactggaacacccgtttggccttgaggtcctccaccgacagcgggccggcgaaatattcaatgtcggagccgtgggcctcctggttatagacgccgttgggcatgaccttgatgaagtcccatttgctgtaatcggtcattttgatgatggcggaggaaaagacctccgcggtatcccggtccgccccgatggtatgcagccagccgcaggcgccgatctccttgaccgggctgccgtccagcatgctgcggatacgctgtgtcgccgtcatgcagaatgcctccttttttccttagtcctttttcttctcccgctgacggaaggagtaatccgggttgagcgtgatgccgcggccgccggaaacttccaccgaagcgccggtcatgaaggtggaacccttgccgcacataaagacgatgggcatggcgacctcgtccacctggccggggcgctggagcagcgtgcccgcgcagatgtgcttcatgttttcatcggtggtgtggtcggtgttgaactcggtcatgatgtagccgggcatgaccgtgttgacacggacgccatatgccgcatactcgccgcccatggtgacggacagcatattggtcgcggccttgagggggccgtacagggtggctgcgccggtggtggggcagcggccgcccagagagctgatgttgacgatggaaccgccgcgatgcttcatggaacggaaagcagcctggcagccgaacaccgcagccttgaagcagatgccgtagatcttttccagcagggcgtcggagtactcctcctcgtcggggcctttggtcagctgcgcgcccacgttgttcacccagctgtcgatggggccgagcttttccacaacatgatcggcaaaggcgtagacgctctgctcctgggtcatgtccaccacttcggcgtaaacggtgcccagacggctgagctcctgctccgcctcacgcagatggctctcggtcacagagcagatggcgaccttggcgccctcctgcagcagcagtctggcagtcgccaggccgattcccttgctggcgccggtaacaacgacgactttgtctttcaaacccaaatccatttctcattacctcctgtatttttccccattggcggggcatagacgaattcaaaccggcggccttacaccgccccgaccctctggcgcagcgccggatagcagtccagcgcgttgtcaaagcagatcatccgggcgacctgccgcgccctcggctcggtcaggcagccctcctcgatcatgcggttgagcaggcgggtgagctgtacccggaaccgcccgtgggcaaaccacgaaatttccgggaacatgacaccgtcgctgccgtacatcaccttatccaggggtgcgcgttccagcagcgccgccatgcgctcgacgcctttcaggctgctgagataaaaggccccggaaaagtcggtgtagacattggcaaactgtgccgtcagatagctggtatcctcctcgtggggatgcccgccgtgcagcagcacgatgcggacacggttcatgaccctgcggtctttcagcagatccaccaggcacagcgggttcatggtggggaaatcgatccagctgccgcccccgtgtcctgtatggaactggaccggcaggtccttttcctccgcggcctgaaggctttccatcagcagccagctgcgcaggatgcgctcatcccccgcccgggcgcttcccgcccggagccggtcataggcctgcccggcctcgtccccctccacggggcggacgtccaggccaccttcgctgtacgccgcgcaggatttcagccccacggccttctgttcccggatctcccggtccagttccgccagaaaccggcgggtatactgttcaaaggtctccccttccggggtcaggccgtcgatgacgcggtcgatgcgaacaatgttcgcctgcttttcttccgggatggatgcaccgaaaaaggctttttcctcctgggaatacagcggcccgccgatggggctgcccgtctccacgcagtgcatggcgacgttgcactcccctatcaggtcggcatagtagcctttggggtctttctcataccggagaaagcgctcccgctccaccgcttcgggggaagcgtcctcggccatgccaaaacgccggcggagtttttccaggatcatgccgtacagaaccgtctgccggccgtggcgctcctgacccggcccggggatgtatccgccgcccagggaaccccattccggggcgcgtgcggggtgtacccggtgcatgtgggtatcgatcagtgggatcttttcaatttcttccaaacggatcatggtgttcacctcacaggcagccgtcgtagcgggcggctgcggcgcggagttcctccgccccgtcatggacctggagttccaggtaaaagtctttgctctccatgggttccagcatgaccaggtcgccgtgttcccgggccttgtcccggccccacgtccggcagttgcagggttccaggccgatgacgtagtcccgcttgcgcaggcatttccagagattgaacttgtccagcgtgtcggcgcggaatttcaccgttgcccctagctgcagcttttcattgaggagcgatgcataggcatagccctctgcgtccgcccgcacggtgtggttgtatgcccgggcgcggtagccgttatccggcggcgtgaccctgccgatctggtccaccgtctggctggccaggtcggaggtggggaagcggtcctgataggtcaggtacagtttggcgccctcgtccagcagagggtagccgaagttcatgtgataaatgagcatcagcggcgtggcggaaaagcccaggttttccacccggtcgtggaggtaaatggtgttgtcccccatccgcatccggatctgccgggtcaggcacaggttttccgcatagggttttgcctggtaggtccgggaggaatattccagccagtagtcgtccccctcccagaaggtgcggcagtttacttcctccgccggaaggttggcgatgtcgccgtggagattgagcgtctcccccgcgtcggtgctgggaagccccgccgtggtcagtccgcaggtggcaagcatgccgccgccaaagtttttgtcccactcaaagggaccgttgtgggcaaaccagggtccggaagcgcccacgccggacagccagcagagggagcgcccctgataggtcaccgagtaaatgtcggaggcccggtcgctcaggaccgtcatggaaagccccgaaccgttccacaggtccgccgctgacacgccgttctttctgccttcccgcagaacatagggccgtatgcccgccagctgcgccatggttccgacccgctccaggatctcctgcttggacaatttggttttcaaagcctgttctcctttctgtaagcattactttatttcaatatgtaattatcaacttcagcaaaattatataggcgaacattacataatgtcaacacattatttttgtattttgtgaaaatcctccttttacacaaaaagagagcctgttttttatcggttaagacaaaaaacaggctctcttttttattgtccggggaggactgttactcagacgatttcggtctgataagacaagaacactttatcgccgcgataccgggagatggaccagcagatgggctgcccctgttcgtcgttgacctgatcggccacatacagcagggatgcccgcgtccgctcgatgcccaaaagttcaatgtcgttcttgctggccaggaccgcctcggtctttacatggcggctggtggcatggatgccgcagttcagctgcaggatctcaaacaggttgagttccgagtaatccttgtccagcagcatggaaaagcgggaggaggacagataggtcgcattgtaaacaatgggggtttcgcccactttccacaggcgtttgaggtagatcaggtcctcgctgctgctcaggttcaggtgctggttgatctcctcaatcttatccaccacgcacaggtccagcacctcgacggtgcattcccgggcgctgttcagcatcaggcgctggaagttttccacactctggttgatttccagggcgattttgggttcggccacaaaggtgccgctgcgctttttgcgcaccaggataccttccgccaccagctcattgagagccaggcggaccgtgggacggctgatctgaaggctttcgcagaattcgatctccgccggcagtttgtctcccagcttcaggttgccgttggcgatctcaattaagaccatacgcttcacctggtagtacagcgggatcgggatgtctttattcagtttgaagcgcgcctcgttcagatccatgctcgtccttctgacatatactcattatgtattattccaatacattccatttatagcatacgctatttttaccccactgtcaacatatcaacgtatttttacagctctatcccccgcgattttccggtttttaggcaatttccgcccgtttgtacaagacgctgttcctctcccgtcgcctccaaaacccgccccgtaccgggcagtgaaaagcccgtgtctttttgtatgcaacccgtcacacaatacgcgccctgcaggccgctgcttcgcgctaaagagcattgattccaggccccggtcctgctatactgagaaaaagaatctttttacagcgtacaatatgtgtacgggtgtttcggggtgccgcggcgtcggcaaggtcataaatctccaaccatgggcaaaaccgccccgttccggagccaacagacgtcacagccgcccggcagagtgccgccgggttccggttttctctcagcatgccgcagcacaccttacacagcaccgccagggcgcacgcagtacggcggagccttccgctccggtgcatgcgtaccgccagccatgaacaggaaggagtttgccgatgatcaccgttttcaaccgcagcgagctgactgtttgcggcacgctggagcaaagccagaaagtctctgccgcccttgagcaggccggcatcgagtatcatgttgcctcccacagtcggacctcgccctccgtcttttccgctggcacccgcgagcgttccggaaccttcgggcagagcgcggcggattcctggacttacaccatctatgtcaagcgggaggatctggaacgtgccagagcctgcctgcgctgatccgccccattttcaacaaataaaaaaactccccgcccatgccaaacccatgagcggggagtttcattttatgctatggccctgttgtcccgggcgcagtgctcagtgacggttgcgtttgcgcacgaccaccagagcaatgatcgcacctgctgcaaccactgccagaattaccagcagcgtaacgggcatgctgtcgccggtctgcggcaccactgcgggtgcgggagtcggcgtgggctggccccaggtgccgttggcaatggcctcggcgatgtcgggatggtcatcttcctccgtaaccgtcgtggtctgggtgttgtcccacaccagtacgaaaggagagaagctgtccgtctcgaaacggatgccgtattgatcggtcaccaggtctttcacgaccacaggctcgttcttgttgatggcatccatgacctcgtccgcagtcatttcacggtccagaccgtcaaaatgcaccaggcggaactgggtattggcattggtcccctggggatacggccagtagatggtgaccttgctgtccgtctggatccaggtgtttccgttggcggcatctaccaagtcaagatactttgcctgggtcgccacgttctggaagccctcgccgacaagttttaccgccttatccaccagcacgctgcggtaatcgctgccgctggcagagttatccgtggacacgatctcatccaccagcagagagggccgtccatcaaccaccttgacatcactgtcattgaccgtatagaccgtgtctttcggcaggacagcagtcacgctgctgaccggctgggtcacgctggaaaccacttccgtggtggaaccggccttggtaacgccgcggatggtaagggtgccgctgtgggccaccgctgcataagtggtatagctgattttaccggcgtctccgccatcctgctgtactttttcggtatcgatcacagcataaaccgtattctgatctaccgcaccgggataaattcccatatcataacgattgtacaaggcattgaccagctcaaattgatcgctgacatggatcgttccatccgcatccacaaactgcatgcggaccggttcctggccatcgcctgccccaagacgatagatgtacttaccattgacaatgctggtattttcaccgtcataacgttcgatcgtccaaaccttgtcgccattcgtaaaggacagatacggcgacaggtccagcgccgtctgcggatcagcacccagcgcctctttcaactgcgcgtccaggtcatcgggcaaggtaatatagaatcccgcctcgggcaagccgttttcagaaccaatatccgcgccgtcttcgtcgacaacaccgttgtagccatcgccccccatatagatggtgatatccgccggggtcagttcaacaatgggcatccaacgcagctcatcctttgtcagcatcacattgctgccattttcaacattttcatacaagggataattgatctgctttgcattcgaatcatcggtataatatgcgtaccgtccaagattttctccactctggatacgcacaacagcctcgccgtcgctggcagtaacagcaaaagcacggtaatccgccgggatcgtcagtttggaatccacaacgccgtctttgagcaggttaatggggctttccgtatcttctgtagaggaatccgtcggggtcacttcccctttcgcaaagcgtccattaagtaccgtatcggtaacgttcactttgccattatcggcagtatccatgtcaatggcaaacttactgccatccgcatatgcaacaacggtagtgcccgccgtgatggtcgtggttcctgcaacaccgccactggctcccgcgccaataccggaagctcctgcaccaccagtcgccgtcacttttgcgctgccggtaatggtaatgttgccggaattgttcacgctaagaccatcgcccgaaccgatcgccgccgcgccatatccgccggcagcattgaccgtggcctgatcctgaatcgtaatcgtcacgaacccagaggaatcacttaccgacatacttgtaccaacacccgcggcataatccttgccagcagccgatacatttgccgaacctccgatcgtaatgtcgagcgtcgacaaagcatcattagacataaaagcactgccgatgcctgcccccacttcaccgccgttggccttcactgttgcattgccgccaatttcaatttgccagggactgacaaaaccatttgcccccaaaccaatggccgcaccgcaatagagacttcccggattatagattgtctgtgcttcgacctgcgcgtcaccatcgatcagaatcttggacttaccttccggcaccgtgcctgccatagcaacattcacagacgatccgccgatggccgccgaagacccgcacaaactggcgttaacctttgtattgcccgtaatatggatcaggctgttctccgtcgcagatccgattcgtccggtgccgattgccgcgccggaaccatgatttttcagatcttcggagacgaccgtcacctcgccgccggagatcgtaattgtatttgcaataccgtctctgtccacagcaggagtcgtataatagttgatgccaggtccgatgccgcagccgccaccgtaattatccaccgaccagacagacacattcacgtttccgccctcaatggtgatatcaccactgtcgccggttccgccggtaggttccatcgggccgccgccgccaatacctgcaccgggaccatactgctccacccggacagttccgctcttgatggtgatggagccgccgtcttctccggcactgccgccaatcgccgcaccatgagccgcagcaccagacgtaccattaacgatcgacagcgaaccatccccctcaacggtcaaggactgaccgtcggaaatgcgcagtggcgcgctaaaatttccacctgcaccggtcagcgtattttccccggtcagagtaatggttgcactaccgctcttgatgtcgatcaagctgctgtcactggaagccgtaagagaaagcccgctgatagagaacgcagcggtttccccctgcccgggatcaacagtgatggtatacttgtcggaagttcctccaatcaccagtccatcagcaggaatagggatctcttcactgtcaccttggctgtaagtatctctgccgattacaacagagccgttggccatatccagaaccgatgactcccggatagttttttcctgcgctccggcatcggcatccccggcaagaacttcctgttcaccggtcgtcggcaaggattgcccatcgccggtgccgtccgacgcctgcatcatcccggtaacttccacaggctggttttcctctgcaaaaacgccgactgccgaaacattcagcaacattgcgcaaaccagcagaacgctccacacctgtgcgcgtatctttttcatttgcggattcctcccattgttttgctccggcacgatggactttgtctccagaattccagacattccctgcgccgtatgttcgcttggctcccaccgggattacaggttttaccggttcgtgtccaagccggcaagggccctttcattcatggataaaaagcgcatcatgtcatttttggtattttatatatgctatcattcaaacgccaaaaattcaacgataaatgccgttttatcattataacagaaccaaaattgcacttacggaggaacgcatttccagccaatccaaacatgaaaaattgatgtttcgaatcaaggtcattttattgcataatttatattttgtcgtttaatctgtcattgtaaaacgcacccgtgtatctccctttcccccgcaaaatacagcagcgtttcatgctgccttttctcttgtttttcgcccgttcctatgtgttcataatactttgcatgttgttttgtttgtttctgccgtcctcccatgattttcttgaaaaggacagaaaaaagccgccccttcccggctgatttccgggttggagcagcttttattttggacaaattttatttgtcgggattttcccctctacaacaggtcagagcttgcgggcagacccgttcttccgggcggaaatcctcaacaaggaccgttttctcaggtcattccacatcctgcagggcggcataatcctgctcgccggtgcggactttaaccacgcggactacattatatacaaagatcttgccgtcgccgatatggccggtgtacagcgtgcgggtggcagtgtcgatgatcttctccaccgggatcttgctgacgacgacctcgaccttgaccttgggcatcagggtcatatcgacttcagcaccgcggtatttctcaccgctgcccttctgcaggccgcagcccatgacctgcgtcaccgtcatgccggtaacaccaatgccgttgagcgccctcttgagggagtcaaacttggcaagctgcaaaatgatgaccactttgtgcataccggaatccaattcggcgggcagaggttcttccctctgaaccttgaccgccgcggccacctgggcggggctggccttatccaggtctccttcacccagatcggtgttttcattggcatccagttcggcataggtcgcatcggtgatggcaaagcctgcataggcgctggccaggccatgctcgtggatatccaggccgtcgatctcttcctgttcggtgacccgcaggcccaccgtctttttgataatggtgaagatgatggtcatggacaccagcacccacgcggccacgcacaccaggcccagggcctgaatgcccagccgggtaaagccgccgccgtaaaacaggccgccgtcggtggcgaaaagaccgaccgccagagtgccccatgcaccgtttgcacagtggaccgagacagcgcccacggggtcgtcgatcttggccacattatcgaagaactccaccgagaagacgcacagcacaccggccacaataccgatgatcgccgcgcccacggggtccacctcatcgcagcctgcggtgatggcgaccaggccggccagagcgccgttgaaggtcagcgagacatcgggcttgccgtagcgcagccaggtggtgatgagggcggcgcaggtagccagtgccgcggccaggttggtgttgaagcagatcaagccggcggagaccatggtgtcgtcaccggtcatggagacggtggagccgccgttgaaaccgaaccagcagaaccacaggataaagacgcccagcgccatggcggtaaggttatggccgggaatggcccgggccttgccgtccctaccgtacttaccaatccgggggccaagcatggccgcgcccaggcaggcggtgacgccgcccacaaaatggaccgcagtggaaccggcgaagtcatggaagcccagctggctgagccagccgccgccccagatccagtggccggagatggggtaaacgatgaggctgatggccgccgagtacaggcagtaggcactgaacttggtacgctcggccatggagccggacacgatggtggcggcggtggcacagaacaccgtctggaacaccacatacacccacaccggcagcgtgccgaagtcataatcgccgcggatgagggggtcaaagccgccgatcagcgcgccggaccccgcaaacatcacgccgaagcccaccagccagaagcagggggtgccgatacaaaaatccatcatattcttcatgaggatgttgccggtatttttggcacgggtcaggcccgcctcgcacaaagcaaagcccgcctgcatgaagaacaccaggaacgccgcaaccagcgtccagatcacgtcagcagaattgtacatacacgatctctcctctctgcatactccccacagcggcacaaccggggagaaaggctgtaccgcaacagcaaaggcgccggggaaattccccggcgcctttgccttggcaacagtatatgcgtgtgatccgcccgcgtcaagcgtttttcacaaaatcatgtgttttgtccaatgttccaccttttctgcgggctcaggtttgtgcagttttgaaaagaaatcgatgcttcccgccgccttacgcctgctgggtctggttgagcaagtgcatgaattcctcgccggtgatggtctccttttccagcaggtaggaggccaggcgatccagggcttcacggttttcactcaggatcttgtaggccttgtcatgggccgccttgatggtagcgcagaccatctcgtccaccttgcctgccgtctcaccggcacaggtcagggaggtatcgccgcccaggtactggttctgcaccgtctccagggccatcatgccgaactcctcggtcatgccgtagcgggtgatcatggcgcgggccagcttggtggcctgctcaatatcgttggaagctcccgtggtcatctggtcctcgccaaagaccagttcctcggcgcagcggccgccggtcagggtagccagcttattgttcagttccacacggctcatgagcatcttttccccttcatccacctgcatggtatagcccaatgcgccggaagtgcggggaatgatggtgatcttggtgaccggggcggagtgattctgcagtgccgccaccagggcatggccgatctcgtggtaagcgacgatgcgcttttccttgggagagacaacggcgctcttgcgctgggcgcccgcgatgaccgtctccacgctttcctccaggtcggcctgttccaccgccgtgcggttctggcggatggcgcgcagggcggcctcgttgacgatgttcgccagctcggcgccggaagcgcccgccgtggaccgggcaatgagatcccagtcaatatcgccactgagtttgaccttggcggcgtggaccttcagaatggcgcggcggccgggcaggtcgggcagttccaccggaacacggcggtcaaaccggccgggacgcagcagcgccgggtccaggctttcggggcggttggtggcggccagaagcaccacgcccttgcgggcgtcgaagccgtccatctcggccagcagctggttgagggtctgttcccgctcgtcgttgccgccgacacccccggtgtcgcgctttttgccgatggcatcgatctcatcaataaagacgatgcagggtgctttttcattggcctgtttgaacaggtcgcggaccttggccgcgcccatacccacgaacatctccacgaattccgagccggacatggagaagaaggggactttggcctcgccggcgacggctttggccagcagcgtcttgccagtgcccggagggcctaccagcagcacgcctttgggcagcttggcgccgatacccgcgtatttttcggggtcatggaggaagtccaccacttccagcagggactccttagcttcgtcctgtccggccacatcggcaaaggtgacgccggtctccgcctgttccacgtagatcttggcccccgatttgccgaaggccatggcgttgcccataccgcccatgttgcccatgcgcttggtcatccagcgggagagcagctcaccgatgaccaggaagaacagaatgggcatcacccaggacacgataaaactcaggatggggttggcctgggtggggatctcggcactgaaggaaatctccgggtcggagcgcagctgctccagcaggcgctggccatcgtcgggccagatgccggtcttgtacacgccgaccttgttattgttgtccggctgttctgccgtgaacaccagctgcccggaactttcctccagggcgacctcctgcacaaggccgtcgtccaccatggtcaggaaatcgctgtatgcgacctccaccaccttggtctcaagcaccgaagggaaaaacagggcgttgagcagcagtaccaccaccatggcgataacgtaataataaattaatggttttttagggggcttgcgatccttatcctggatctcctgcataagacatcctcctcgtctaagcgaaaaaagcctgaccatgcggcaaatccgcattgcagtctcacttttgaagggtatgataccagacggaatacgaacttcctgtgaacaaaagctgaattgtttataaacttttgcctggcaggctgcgccgattccggacatactcccagtatcagtatatcctcacattacgggaatgtccatggacggttccgggcttttgtctcaaaacagaccgcacaggctcagggccaaaagcaggataccgccgtagtaggtgacaaggttggcaatgtgaagcccgacgctgcggccctgccgtccgaaatagaggaacagcaaaatgaaatccgacgtccagaacagcgctgcacccgcgcagagcaggaccgccgcaggggtcgccagggcaaatgccaccgacaggctctgggccagcagggtactcaccgcaaagctgtagcacaccccgaaaggcaccagcctgcccatgttcacggcaccccggcgcaacagcaccaccagaacggccgccgaaaccgcaggcagcaaaagccaggccggggcggcggtgtgcagcttccacagtccgcccagaaagcagagatgcccgcagaagaagacgccgatgccccctgccatccatgccgtgcggcgggaaaggttgtacacccccagggccacatcccccgccgcgcacaggacaaagcccgccgtaaaggtgcgcaccccgggggtgatgtttccctccagggcgcacagcaccgccagcacgataaaggcaagccccgccgcagcctttgccgccgggtaagcggtgcgtccccgcagggcaaggaccgtccccgccagcaccagatacaccgccgccgaaacctcgatctccatcccatgacctccctgccggggcggcgttgcaaagcggccccggatacgatataatcaacatcggtacagcatttgtaccggacgaacgtcactgtatgcgggcaggtctgcccgcgttccagctttagtataacggaagcctcctgcggcggcaagcgccggggaagcgccggcggcataaggtccgcttttcccctgcggggaatggcgcagcatcgtaagttccaccgtcacaagcgtgtttatggcggggacaaattttacgtcacaaggtcttttgcgcgcacggcataaaacgaaaggcaggtttttggcatgaagatcaccgttgccggcaccgggtatgtgggcttgtccatcagcgtgctgctggcccagcacaacgaggtgtgggccatggacattctgcccgccaaggccgaggccatcaacgcccgccgctcccccatcgcggacaccgagatcgaggagtatctggccagccgggacctgaacctgcgggccaccaccgacgccgcggcggcctatcccggggcggatttcatcgtggtggccacccccaccaactacgacccggacaaaaactattttgacacctccagcgtggaggcggtgctggacctggccgggcagtatgccccggaggccaccgtcatcatcaaatccaccgtgccggtgggctacaccgcccagatccgcagccgctatcccggccggcagattctgttcagcccggaattcctgcgggaaggccatgccctgtacgacaacctctaccccagccgcatcgtggtgggcgcccccgccggggacgacgccgccctggcaaaggccaaacagtttgccgggctgctggcggagggggccatcaaggaggacattcccaccctcttccccagcctgaccgaggcggaggccatcaagctgttcgccaacacctacctggccctgcgagtggctttcttcaacgagctagacacctacgcggcggcccggggactggataccaagggcatcatcgagggcgtctgcctggacccgcgcatcggcagccactacaacaaccccagcttcggctacggcggctactgcctgcccaaggacaccaagcagctgctggccaactaccgggacgttccccagaacctgatccaggccattgtggactccaaccgcacccgcaaggattttattgcggaggatgtgctctcccgccatcccaaagtggtgggcgtctaccgtctgaccatgaaggcgggcagcgacaacttccgccagtccagcatccagggcgtcatgaagcgcatcaaaggcaagggcgtccccgtggtggtgtacgagcccaccctggacgccggggagttctacggcagccgggtggagcacgatctggacgccttcaagaaagaatgcgacatcatcctgaccaaccgcgccgcaccggagctggccgacgtggcggacaaggtctacacccgcgacatctattcccgggactgatccgtttgccggcagccgcggcggggcagactcttttgagataagcgccatgcatccgtgcggccaacattcaacaattttacgttctacggaggaaaactcttatggttcaaaacactgatatcgtcgtcatcggcgcgggcatcgcgggcatgacggcagccgtttacgccgtgcgcgcgggcaagcgcgtgacggtgctggagtgcgagggcttcggcggccagatcgcctcctctccccgggtggaaaattaccccggcattgcgggcatttccggcgcggacctgtccgacgccatgtacaagcaggcttccgacctgggcgtggaatttgcctttgcccaggcccagtccgttgctccccaggccgacggcggctttgtggtggagagcgacgcgggcacctacgcctgccgcagcgtcatcctggccaccggcgcccatcaccggggcctgggcctgcccaaagagaaggaactgacgggccacggcgtggcctactgcgcggtgtgcgacggcgccttttaccgcgacggcaagaccgccgtggtgggcggcggcagcgcggctttgcaaagcgccgagtatctgtgcggcgtctgcaaggaagtggtgctgatccaccgccgggacgagttccggggcgaggccgccctggccaagcgggtctgtgccaaccccaacctgaccctcatgctggacagcaacgtggtggagtacctgggcgacgacaagctgaccggcattgtggtggagaacaaaaagaccggcgtccgcaccgaagtggcggtggacggcctgttccttgcggtgggccagcagcccgccaacgagcggtttgccccgccggtggcgctggatgcttccggctacgtgctggcgggtgaggactgccgcaccaatgttcccggcctgtttgccgcgggcgactgccgcgtcaagacggtgcgtcagctgaccaccgctgccgccgacggcaccgtggcggccctggccgcctgcacctgggtggacgaacacccggcggcggaatgaccgaaggaaccaagcaatcaatcaaaaaaacggcggacgcaggagaaagttctcccggcgtccgccgtttctttttacgggtttacaggatcttgcggtggtttttgacccgcagggtgttgtacgcctgcagcagatggactccataccagatcagccccagggaaaacaccacgaacaccacggcccccgccgtgttcagcggcacaagatcgggcagcgccgtctgggcaaacagcagcaccgtctggacggccagcaataccgccagtgcggggcgcagcaggcggtgttttgcggtgtaggcttcgtcgttcaaaagctgttccgcggcggtcagcgtgacccagaccccggccagcaccagccacaggtcagcggagcgcagcaccgggcgcagccagccgccgttctccatgccgcagagcagcagttccagcacaaactggccgcagtaagccacaagagccaggcgacaccgtgcccccagcaccgccgcccccaggcctgccagcacggtcagggtgacttcggcagtggaactggtcccctgcacccccagcagcgcacggccgatggccgccactcccagcaaaagaaagcccagcgcaggacggttgtttttatccatagattttatcctccgtgcatcatcggtcttttgtgattgtaacatgcaaagctgtttgctgcaaggcgcgagtgacataagaaaacaaaggttctgccagaactgcgaagcattgcaaaactgctgcaaggcggcagatgcaaggcagaggggcgaaacgatcctatgtggaacgcaagacccgataacgcagcaggtgccgccttgcagtcagagttttgcggctttgttttcttatggaaccgcgcagaatacagacgaattttgtcttgcatccgggcggccggtctgctacaatgaaatttatgcagtatgcctgaccgcgcagcggcataaatcgggcatttgcagcttgtgagggggttatgaatatgcagttttccaaacgtctggacctgttcgggcccgagatcttcgccgcgctcaacgacaaaaaggtcgagctggaacagcagggcaaggctttgtacaatctttcggtgggcacgcccgacttcccgcccgcaccgcacatcaagcaggcgctcattgacgccgcccagtcggacgagaactggaagtacagcctgcgggacatccccgaactgttggaggtagtctgcgcctactaccagcgccgcttcggcgtggagggtctgacccccgaccaggtcatgagcttttccggcagccaggacggcatcggccatctgggcatggccctgtgcaacgacggcgacctggtgcttctgcccgacccctgctaccctgtctttatgaccggctccatgctgggcggcgccgaaccctggtactatcacctgaccaaagagaacaacttcctgcccgatgtctccgccatccccgacgaggtggccgaccgggccaagtatatgctggtttccctgcccgccaacccggtgggcagcgtgggcagccccgaactctatcaggagatcgtggatttctgccgcaagcacgacattcttctcgtccatgacaacgcatacagcgacatcatctttgacggcaaagtgggcggcagtgttttcaacactcccggggccgaggaggtcgccgtggagttcttcagcctgagcaagagcttcaatgtcaccggcgcccgcgtcagcttcctggtgggacgccgggatgtggtggccgcctgcaaaaagctgcgcacccagattgacttcggtatgttcctgcccatccagaaggctgccatcgccgccctgaccggaccgctggacagcgtcaagtcccagtgcgccgagtaccagcgccgccgggacgctctgtgcggcggcctgcggggcatcggctggaacgttcccgacagccacggcagcatgttcgtctgggcgcccctgcccgccggctacaccaacagcatggccttctgcatggacctgatcgacaaggccggggtcatctgcacccccggctccagcttcggaccttccggggaaggctacgtccgctttgccctgaccatgccggtggagcgcatccaggccgccgtccaggccatcgccaagagcggcatcctgggctgaggtattgaatccttcataaacatccaacactcctgccggagcctccggcgggagtgttttttgcatcttgcccaaaatcgccgcataaaatttgtgaacatttttgaaattcttggtcccacctcttgcatccggtcgcggacggggtataatgttgcatacgagagatacttaacgcacgttaaattttatcaacagttaagtattccacggaaagttggtgagacgatggaaaacgatcacgcgctgagcgaccttttgcagctgttctggcagatccgcaagacggtacagcgcagcatccagcaggctgacccaggcaattcccggggggatatcgccatgttggagcggctgcactatgtcatccggcagagcgggcaggacggcgcggtgccggtgtcggctctggcggagcgtctgcgcatgctgccgccggcagtctcccgcaccctgcgtcagctggaggacaacggcttggtggagcgcatccacgaccccgaggatcaccgccgggcgctggtgcgtctgacggaaaaaggcgaacagatccgcctgcaggccgaggaccggatgcgggactacatgcaccgggtcatcgaccgtgtgggggaggaaaccttttcccgtatgctggccgacctgaccacctgggaacaggccatgcaggccgagcttgaccagacgcctgacgccccggccccggagagcgcacagtccaaacattcccgcgctcacgaaatctgaattgtaaggaggaatgtctcatgctcaatattttccgcaacctgggcaaacattgggccgcctgcctggctgtggtcgcgctgctgatcgtacaggcaagctgtgacctggctctgccgggatacacgtcggacatcgtcgacgtgggcatccagcagggcggcgtggacagtgccctgcccgacaccctgcgcgataccacgctgcaggctttgaagatcctgatgcccgacgacgaggccgcggccctggaagccgcctacgcccccgccgacgaaaacggcgtccgcactctgctggacaccgccgacaccgaatccctggcttccagcctgaccatgcccgatgtggccctgtatatggcggctgcggcccagtcggcccagcaacagggggtggacaccgccctgcccgagccccaggatctggacaccgctgtcgccatggtcagcgccgcggcggcgcagcccggttttgaccatcaggccatgctggaccagatggcttccgcccaggaaaacctggcccccgatactgagaacaccctggcttcccaggcggtgcagctggtccggctggaataccaggcccagggcatcgacggtgacgtgcagatgtcctacctgctgcgcacgggcggtcagatgcttctgtacagcctgctcatggtggctgccgccgtgtcggtgggcttcatcgcctcccgggtgtcggcggccatcggccgcgacctgcgccgccaggtattcagcaaggtggtctccttctccaatgcggagaccgaccgcttctccaccgcatccctcatcacccgcaccaccaacgacatccagcaggtgcagcagacctccgtcatgctgctgcgtatcgtggcctacgcccccatcctgggcatcggcggcatcatccgggtggccggtaccgccaccgggctgtcctggatcatcgtgctggccgtggtcctgctcatgggcatcgtctttgtgctgatgcaggtggccctgcccaagttcaagctgatgcagaccctggtggaccgcctcaacctggtcagccgggaaattttgaccggcatcatgcccatccgtgcgttctcccgcgagaagtacgaggaagagcgctttgacgctgccagcaaggacctgatgcgcacccagctgttcaccaaccgggtcatgaccttcatgatgcccaccatgatgctcatcatgaacggcaccaccctgctcatcgtctggttcggcgggcatgccatggcggaaagcggcatgcagatcggcgacctcatcgctttcatcacctacaccatgcagatcgtcatgtccttcctcatgctgacggtcatttccatcatgctgccccgtgcgggcgtggccgccgaccgtatccaggaagtgctggacaccgagccggtcattgaggaccccaaacccgaggctctgcccgccgggctggaccgcaaggactggaagggcgtcgtccgctttgaccatgtccacttccgctaccccggcgccgacgaggacgccctgaccaacatcgactttaccgccgagccgggcaagaccaccgccatcatcggtgccaccggctgcggcaagtccaccctgctcaacctgatcccccgcttctacgatgccaccgagggcagcgtgacgctggacggcgtggacatccgggacattccccagcagacactgcgcgcccagctgggctatgtgccccagaaaggcgtgctcttctccggcaccattgagagcaacctgaaattcggcggcagcttcatcaccgacgacgatatgcatcaggctgccgatattgcccaggccaccgacttcatcaccgccaagaccgagggctttgagagccccatcgcccagggcggcaccaacgtgtccggcggccagaagcagcgcctgtccatcgcccgggccatcgccaaggcacccaaggtctatctgttcgacgacagtttctctgccctggactacaagaccgacgtggccctgcgccgggccctgcgggaaaagaccggtgactccaccgttatcatcgtggcgcagcgcatctccacggtgctgcacgccgaccagatcctggtgctggacgaaggccgcatcgtcggccggggccgccacagcgagctgatggagacctgtcccgagtaccaggagatcgcaaagagccagctgagccagaaagagctgggcatcaaccacacggaaggcggtgaatcctgatggcacaacctgtaagacgcggtcccatgggcggccacggccccggcgccgtggaaaagcccaaggacctgaccggcactctgcgccgtcttttgaacgcgctgggcaaataccgcacggctttctttgccgttctggtgtttgcggcgctgtctaccattttcaacattgcaggccccaagatcctggccaaggccaccaccgccctggccaccggctggtacgccatgatcaccggcaccggcagcatcgactttgcctatatcggcaggattttgctgattttgctggggatgtatcttttgtccgccgggttcagctttatccagggctggctgatgagcggcatgtcccagcggctgtgctatgacttccgccgccagatctcggaaaagatcaaccgcctgcccctctcctactttgaaaagcgcaccgtgggcgaggttctgagccgtatcaccaacgacatcgacacccttggccagagcctgaaccagagcgtcacccagctcatcaccagcatcaccaccatgatcggcgtgctgatcatgatgctgtccatcagcccccagatgaccctcatcgccctgctcatcctgccggtgtccgtgattctggttttgctggtggtccgcttcagccagcggtacttcaaggaccagcagaactacctgggcgtggtcaacggccaggtggaggagatctactccggccacaacgtggtcaaggctttcaaccgggagcaggccgtgcttcaggacttttccaaggccaacaacaagctgtttgactccgcctggaagagccagttcctctccggtctgatgatgcccgtcatgacctttgtgggcaacctgggctacgtggccgtggccgtggtgggcagcatcctggccgccgcggggaccatcaccatcggtgagatccaggccttcatccagtacgtcaagaacttcacccagcccatccagcagctggcccaggtgtccaacatgctccagagcatggccgccgcagccgagcgcgtctttgaattcctgggcgaggaggaggaagaccagcaggccgatcccgcccgccgtgccgaccccgccatcatcgacggccatgtccgcttcgatcatgtcaagtttggctacacccccgacaagaccatcatccatgacttcacctgcagcgtgaagcctggccagaaggtggccatcgtcggccccaccggcgcaggcaagaccaccatggtcaagctgctcatgcgcttctatgacgtggattccggcgccatcctgctcaatgaccgcaacgtcagggactttgaccgcagcgccctgcgggaaggcttcggcatggtattgcaggacacctggctgttcaagggcaccatcatggagaacatccgctacggccgtctggacgccaccgacgaggaggtcatcgccgcggccaaggctgcccatgccgaccactttatccgcaccctgccgggcggctaccagatggagctgaacgaggatgcttccaacgtgagccagggccagaagcagctgttgaccattgcccgggccatcctggccgacaaccgcatcctgatcctggacgaagccaccagctcggtggatacccgcaccgagcagcgcatccagaaagccatggacaacctgatgcggggccgcaccagctttgtcattgcccaccggctgtccaccatcaaggacgccgacctcattctggtcatgcgggacggcgacatcgtggagcagggcacccacgacgaactgctggcccagggcggtttctatgccgacctgtacaacagccagtttgaggacgtcaccgcctgatccggttgttcaaacaagtttccccggacctgtttttcaggcccggggatttttgcgggccggtacgctgccatccgacagcctttgacatccaaaaaaggctgctgtatactgtttgccgggaaagtatgcggctgtcattgggacacagccgcacgggagcggaggccgtttttcctccgcaaaagcggaacagcacgggaaaaccagggctttgccgttgaagcattcaagcccgggtatccttgtgcggagccgcaaaacaaggagggggttcattatgaacggctattccatctctctgcctgcccaacggcgggaggaagcgcggtttgccgcgctggccgtcaacgccggatttgcaggcgctttcggcagtgtgtattgttcccacgtgttcgccaacgcacagaccggcaacatcatcagcctggccgccgagatccacagcggcaagtgggcgggtgttgcctcccgcacggtggcggtgggactgtttgtcctggggatctacttatccatccgcctgccctacctctggttcggcggcgaccagcggcgctggaagcgctgctgcctgctcatcgagactgcctgctttattttgcagggacttttgccctttgagcttctggcgggcatctccccggccatgtacctgtggccggtgttctttgcctcggcattgcagtataacacctttacggcgctgcacggcgtgccggtgtccactctgttcactaccaacaacatccgccagctgactctccatgccaccatctggcggcagaaagcccggggcctgaccccggcctcccaggaggaagcccggcaggagcgccgcatctcgctgatctacattgcggtgttcatcgcctttttcggcggtattctgggcggggtctacctgacttatctgatggagacccgcctcatgttcctgtgcgcgggcatcctgttcgcggtgtgggcctggcagcgctgggacgacacccgcgaatccgcctgagtgacttccctgtcacaacagcaaaaagctcccctttccgtacccggaaaagggagcttttgtttttgcaatggttcagcccaaaaagacgtccagcatcatcatgaccaggaagcccagcagcacgctgatggtcccggcgttggagtgttcgcccagacgggcttcggggatgagctcctccaccaccacgtagagcatggcgccggcggcaaaggccagcagccagggcatgacggccagcgcctgccccgccaccagcacgatgagcagaccgaacaccggttccaccacaccggacagggcgccgcagacaaaggccttgccgttgctcacgccctgggccttgaggggcagggacaccgccgcaccttcggggaagttttgcagtgccatgccgagggccagagctatggccccggccagcgccccctgggaggggtctgccgccgccaccgagaaggtcaggcccacggccatgccttccgggatattgtgcagcgtgacggccagcacgatcatggtggtgcgtttgagccgggcgggcaggccttccggctcctcactgcccacatgcaggtggggcatgagccggtccagcagccagaggaaggtcgccccagccacaaagccgccgcagacgggcagccccaccgaaaacgccttgggcataccgggcgcggcctgctgttcggccatttccatggcggggatgagcaggctccataccgaagccgccaccataacgcccgccgcaaagccgagaaacaacttttgggtcagctggcccatctcttttttgaagaaaaataccatggcggcgcccagaacggtggccaggcaggtaaacccggtccccagcgccgcgtacaaaagttctttttgcagcataaggtctccttttaggtcggtcgaaagttcgatgtcgggaaaaggtcgggccttgcgcaagccttggacaagaaaagccggccgctgtcagaacagcggggccatggtgcgcagcacagccgagagcagcgtgccgaaaaagctgttgcggcactcgttgagggtgacggcgcggcagtgggattccagctcgatcatgtcggcgcggatatccgccagggcgcggcagccgtacagcagagtactgcactcaaaatgcaggtagagactgcggtagtccaggttgacagtgcccaccgcggcaatgcggtcgtcacacagccaggtcttgctgtgcagaaaacccggcgtatagctgaagatccgcacacccgcctggagcagcggctggaagtagctgcgggtcagctggtaggtcatctttttgtccgggatgccgggggtgtagatgcgcacatccacaccgcgcttggccgccaggcgaagcgcggtcaaaagctcgttgctgaggatcaggtagggcgtggtgatgaacagactgtaccgcgcctgattgatgagctccagatagacattctgggagacgttctcccggtccaccgggctgtcggcaaagggctggaccaggccgtccgccacaaaaggcgcgggacggtgacgctcggggcggaaatgctcaaagtcccggtcggttgggcggttggcgttccagaattccaggaacatgatggtaaaactccaggccgcgtccccccgcaggcggatggcggtgtcccgccagtgaccgaagcgttccagcttgttgatgtactcgtccgcaaggttgaccccgccggtaaaggcggtgtagccgtcgatgaccatgatcttgcgatggtcgcggttgttcatgacaaggttgatggccgggacaaaggggttgaagggcaggctgtggatgccttcctcctccagtttgctccagtatcccatgggcagcacgctgacgctgcctacatcgtcataaatgacccgcacgtccaccccctgcgctgccttgcgcttgaggatctcgtggatctggtcccacatggtgcccaggccgatgataaagtattcaacaaagatgaagtgctcggcactttccagggcgggaagcatatcggcgaacatatcgtcgcccaggggataatacttgacctcggtgtcggaaaagaccggataccgccctttgcggctgagatagcgggccgtcagtacacctcggggatcgttttgtttgagacgctccaccggttccggttcctgggtcaacagcggatggatgcgtgccgcggcccggtccagtttgcgccgcagccggaaagccggccgcttgttgccccacaaaaggtacaaaataccgccctgcaccggcatgaccagaaacagtaccatccagctgatcttgaattccggttcaatcgaatccacgcggatgagcagcaggcacattatcacactgaacgccgtacatacgccgttgatccagggcatgtagtcggtaaggcgcaaaaacagaaacgccatccacaccacctggctgaggatcaaaagaccggtcagcacaacgcggctgaacactgcgctgtaaatacgtttcaggatacgattgatcttgcgcaaggaatactcctttcccgttcaggtcggcaccgccgatatcgggaatccctgctcccgggcgggccgcaaataatatccctactgtatcactatgcggcagaaattgcaagacgtcgtcgaaaagcgagccccccgggcggtctgttcactttccggaggggctgttccccaccctatccggctgtttttccgccatggggcggcgtttttccaggcagagtgtaccgtctgccaagcaggaagtcaatattttcccgcggggttcaaaatatttttatcgccatttcgttatttattttctattttagcactctctgcgtttgattgctaatttttcacatttatataacaatttgttcatattccagcggtatcctatagttgtcgaaagggaaagcccccaagacaaaaacaaaaccacttacacgtgaccggcgcaaaacgccgtttgaaaaaaaggagatatgacttatggcacttctgatggatcgtcgttacaatcccttccgtgattttgaggacatcaaccgcgcgttcttcggtgacaattccctggcggaattcaagaccgatatccgggacgtgggcgacggctttgtgctggaggccgacctgcccggcttcaagaaggaggacatcaagctgtccctgaacggtgacacgctgaccatcaaggcggagcgtcacagcgactttgaggatcaggacaagaagtccggctacctgcgctgcgagcggagctacggttcctacagccgcagctttgacgtgaccggcgtggatgtcagccagatctcggccagctacaacgacggcgtgctgcgcatccacctgcccaagcaggccccgaagcagcccgacgcccgcaccatcgtcatcgagtgattttcccgtgagcccgcctgatccggcagtctgataccggcagagggatttctgcaactcatacaggggaaggcccggatgccaaaagcatccgggccttcccttttgtcgttcctccccgcaggaagggacggtattccatacgatgtgcgttactcggcgtcggtgcgggcggcacggatctccgcctcaaaatcggcgtactcgcggatgtactcgctctcgtcatagtgctcgcttgccaggcagagcagcaccgaatcggggctgaaatcgtacatctccttccacgccatgcggggaatgtacacgccggtgcgggggcggttgaggcagaataccacctcattgcccaggccgtccatgaccttgaccttgctcttgcccgccacgttcaccagcacgaactcgctgcggcggttggcatggctgccccggacgatgtcagggtcggagccgtaaatataaaagacacgctggatggcaaagggaatgtccttttccccctccacaacgaccaggttgccccgctcgtccccgtgttcggcaaactcgataaagcaggcgctcttggcgatctccatggcgtgctactcctttctgtggtgcgggcgatcagacgcagcccggacggtaggcgttgatggtgcggatgacggtctcctgttcctcctccgtcatgccgttgtacatgggcaggctcaggacctccccggcatagcgctcggcgatggggaaatctcccttgtgatggcccaggtttgcataggcctcgctgagatggggcgggatgggatagtggatgatggtgccgatgtcgtttttgtccagccaggcagccagttcatcccggaagccgggcagatgcaccacgtactgatgccaggagctgtccgcccccggacggatgcggggcttgataaggccgggcaggtcgagttcggcgtcgtagcgggcggcaatgcggcagcgctcggcgttgaaatcctgcaaatactggagcttgacccgcaaaaggcccgcctgcagttcatccaggcggctgttggcacccaccaccttattatgatagcggcggtcactgccgtaattgcggaacacccggcagcaggcggcgatatcgtcgtcgttggtggtgatgcagcccgcatccccaaaagcgccgcagcccttggtgggatagaagctgaagcagccgatgtcaccgatggagccggtgacctggcctttccagtggttgccgtggctctgggcgcagtcctccaccactttcaggtcgtggcggcgggcaatgtccatgatcttgtccatgtcgcagctctggccgtagaggtgcaccgccaggatggctttggtgcggggggtgatggcggcctcgatcttgtcggcgtcgatgttgtcatactcgtccggctccacaaagaccggcgtggccccgttgatggtgatgcccatgacgcaggcgatgtaggcgttggcgctgacgatgacctcgtcctccgccccgacattcagcaggcggaaagcgatccacaaggcatccagtcccgacgccaggcccacacaatgctttgcccccaccatggcggcccattccttctcaaaggcttccacctcgcggcccaggatgtaccatccgctgcgaagcacctcgatggctttcgcctcatattcggccgcgtgcaggccgtactgccgccccagatcgttgggcatgatccgcatggctgtgcctcctcaaaattttatgcattccgggaacatcccggggatatctatgtgttttttcattataccatatccgcaccgggatgcaaagcgggcggggcagcctgattttgacggcagctgatttcccggcctttctctttcggcctccccacagcctttatcccgcgtccctccgcaaggcgtgttgacaagtttacttggcagatttatactataaataagccaagtaaactttgcattttgatgggaggccgccggaatggacagagacgaaattttagccaaaagcagagcagaaaacaaaaaccaggacgtatatgagcaagagatcctgaaactggccggcaaaaccgccgtcgtggttcagatgattctggcggctgtcttttttgcggtacaggcaatcaccggcggcgggatcaactgggggttgtgggcccttgtggtcagtgcggatatgacgctctcctgggtgaaatatgtcaaactccggcgcaaaccggaacttgccattgcaatcatctatacgatcgttgtatccgtcatgtccgggtatcacatctacagcctgattgcctcttccgcaaccctgtaaggcggcggaactatggatgacaaactgattttgaaaaatcgcctgaaagaagcacgggcagaattgaaattgtcccaaagccagctggcggagatggtcggtgtttcccggaacaccatcagttccattgaaaccgggcaattcaaccccaccgcaaaactggcgctggtgctctgcattgcactggacaaaaaatttgaagacctgttctacttttgaaacggcaccaaaacaagggcacacctgccgtcggcaggtgtgccgcaaaaagtccccggccggaattttcccggccggggactttgtttttgctataaatccccttttacagggcgcagggagtaaagccgtccttgcccagcaccaggaccttgtcatagcccaaggccttgaggccggcggcagcctgctcatagcctgcggtcagggcgttggcggagtgagcgtcggcggtgatgatcacgttgccactcagagccagccaatccttcagaatggcgtcggaggggaagaattcatcccggaagccgcgatgcaccgcgctggtgttgacttccagcacgcagcggttgcgcgccgccgcggccagggcgtccgccgcagcctttttgtagcgagggtcgttctcgtcaaagaacttgccgtcccggttgatctttttgatgaggtcgaagtggcccagaatggtggggtgcttttccgccaccttggccacgttggcaaagtaggcttccgccaccgccagaccgtcgccgtcaaaatcgtcacggatgcaggcggccaggtcggactcgcgccagtcgatctcgtagtatttgccggtcttggggccctggacatagtgggtggagccgatccagtaatcgtatttcgacggatcatcgtcggaatacagatcccattccagcccgtagagaatatccatcttgccctggtactgctttttcagccgggctgcctcgcccttgtactgggcggtgcgtgccggactcatgcagtattccagatcgcacggggtgtggctgtggcccgagaagcccagggttttcatccctgcgcgccaggcggtgaccgccagttcgtccatcgtgtttttgccgtcacacagcttggtgtggacatgtaccgagctgagcatgtattcgcctgccattactgcatcctctcctgctttactttatggtcgatcacatgacgtttttccagttctttggtgatatcctccaccgagatacccagttcgatcatcaaaaccatcacatggtaggcaaggtcgctgatctcatagatcgtctcttccttgtcctttttcgccccggcgatgatgacctcggtgctttcctcgcccacctttttcaggatcttctcgatgcccttgtcaaagaggtaggtggtgtagctgccctccttggggtcggtcttgcggccttcaatgaggtcatacagcccctgccaggtgaactgcttcagctcctctgacacgtagaccggattgaagaagcagctgtccgcgccggtgtggcaggcggggccggatttgaccacgtccaccaccagggcgtccttgtcgcagtcggcagtgatggacaccacccgctgcacgttgccggaggtctcccccttgcgccagatttcctggcggctgcggctgtaaaagacggtgcggccttccgcgatggtaagggccagggtctcggcgttcatgtaggcgagggtcaggacctcgcgggaataatggtcctgaacgataacggggatcagcccgtttgcgtcaaacttgagggttttctcagtgtcaggatattgcatagttttcgctcctgtcatgtgatacatatagtttaccttgccttgcgttattttgcaaggcataaaaatgtggggtcacaggcgcatttccacgccgttttgccgcaggtattgtttcaggtcccggatatccacctgccgggtgtggaagatgctggcggcaagccctgcgtccacggcggggtgctccagaaacagggtcctgaagtcctccatgcagcccgcgccgcccgatgcgatgatgggtacggcacagcgctttgccaccgcgtccagcagttccaggtcaaagccgtttttgacgccgtcggtgtcgatggagttgaccaccagctccccggcgccgtttttcacgccccgttccagccagtccagggcgtcgatgccggtgttttcccgcccccccttggcgaacagcatgaatttaccgtccacccgcttgatatccgccgacagcaccacgcactggtcgccgtatttctgggcggccgccgggatgatatcagggttggcaatggcccccgagttgacgctgaccttgtcggcaccgcacttgagcacccggtcaaagtcgtccagggtgcggatgccgccgcccaccgtcaggggaatgaaaatctccgacgccacccggcgcaggatatcggtaaagagggtgcggccctccacgctggcggtgatgtcgtaaaagaccagctcgtccgcccccgactggttgtaccagcgggccatctccacggggtcggccatatctttcagcccttcaaagttgacgcccttgaccacgcggccgtccttgacgtccaggcagggaatgatgcgctttgtaatcatggaagttccctccttctctcagccgaaacggcgcacggcctcggccaggtcgatggcgccggtgtagaccgatttgcccagaatggcggcgtgacagcccatggtctgcagggtgtccagctcctccatttttgcgatgccgccggaggcagtgatctccagcccggggatggtcagcagctcccggtagagatccatgttggtcccctgcatggtgccgtcccgggagatatcggtggcaatgaccgccctgacacccgcttcggccaggcggcggcagaaggccacgcccggctcgggggtgacttccttccagccggccacagccaccaggccgtccttcatatccacgcccacggcgattttatcgccgtacttttgggccatgcgggcggtaaaatcaaagtcccgcaccgccacggtgccgagaatgcagcgggagacgcccaggtccaggtaacggaggatgcgctcctcgtcccggatgccgccgcccacctcgatgtagaggtcactttcggcggcgatacgggcgatggcgggcaggttggcggtggtgtcgtccttggcgccgtccaggtctaccacgtggaggtatttcgcccccgctgcggcgaaggcccgggcttggtcgacggggtcggggttgtagacggtcatctggtcgtagtcgccctgatagagccgcacggcctggccgccccgcaggtcaatggcaggaaacagtttcatggtttgcccctccttacagttcagcgaaggcccgcagcaaacgcaggccggtgtcgccggatttttcggggtggaactgggtgccgtagacgtggccgctgcgcacagcgccggtcacggggatgctgtactcgctggtaaccagggtgctggcggcgcagtccttggcgtagaagctgtggacatagtagacgtactccccgtttttgacgtagcggaagagggggtcgtcctcccggccgggcacgatgtccatggcgttccagccgatgtgaggcaccttgagggcggggtcggccagatcgtccgccagaggacagaccttgcccggcaccagacccagcccggcgtggcagccgtactcgtagctttcctcaaagagaagctgcatgcccaggcagatgcccaacagcggctttttggcggcttcctccttgatgaccggcacaagccccgtgtcggtaagtttctgcatggcgtcgccgaaggctcccacccccggcaggatgatatgggatgcggcgcgcagccgcgcggcgtcccgggtgacctcggtctccaggccgaggcttttcaggctggaggccaggctgaacaggttgccgaccccgtaatccacaatggcgatcatctgctgtcccctcctcgttgtttttgtcaggccagaatctcccgcagggcggcaaaaaatccctgcatctgctccggcgagccgatggtgatgcgcacccagtcctgcaggcggggcgtggcgaaatgccgcaccagcacgccccgctgtttcagcgccttgtacagttcaccgccgggcattttgggcgttttggcaaagacaaagttggtgctggaatccagcacggtgaagcccatttcccgcagggtgtcggtggtgttggcccgggtgtcccggatggcggcgcagtttttgtcaaaataggcacggtcggccagggcggcgatgcctgcggcctcggtcatgcggtccacgttataggggttcatgctgtacttgatgcgcttgagatcgtcgatgagcgccttgggtccgatgcacaggcccagccgggcgcccgccatgctgcgggacttggagaaagtctgcaccaccatcaggttttcgggggtgccctccctcacgaagcggacgcagctctccccgccgaaatccacataggcctcgtccacaatgaccaccgcgccggggttgcggcgggcgatctcggccagagcgtcggcgggcaaagtcaggccggtgggggcgttggggttggcaatgacaatggcccccacattttccttttcatccagtccgtagtagtccgccgggtccagggtgaaatcctctttcaggggcagcaccttttgggggatgccgaacaggtcgcaccagacgggataaaaaccgtaggtcacgtcggcaaaggcaaggccgcgccccgccccgcagaaagcgcggatggccagcatcaggttttcatcgctgccgttgccgcacagaatgttgtccggctccaccccgtcatacagggcggcggccttggccaggcggccgttttccgggtcggggtaaaggcgcagggcctcgctggcggcggcgaccacctggatcacgccgggggcgggcgggtaagggctttcgttggtgttgagcttgatgtactgctggtcctggggctgctcaccgggggtgtagggttccaggcgttccagctcggcagtaaaataacggctcatggcagacggccttcttcctgattaaaataaaatgtcagatgtttttgcgcaccacgcggcagggattgccgcaggcgacggaatcggaggggatatctttggtgacgacgctgcccgcgccgatgaccacattatccccgatggtcacgccgggcagaatgatggccccgcccccgatccagacgttgttcccgatggtgaccggggcggtctgggttttgcagaaggcaaaggagccgtcggcacggggttccccgaaacggtcttttgcgttggtggggtgaaaggcggtgtagatctggacattcggcgcgatgagggcattatccccgatggtgatgcggttgtcatccaaaaacgtgcagttcatgttgacttcgcagttgttgccgaagtggatattgacgccgtagtccacataaaagggggcggtgatccagaggtttttgccccggctgcccagcatttcgttgaggatgcggtccttggccccggcgtccgccgagtcggtgcgattatagtcccgggccaggtctttggccttgtgccacagggccagcagttcggggtcgccgcagtcgtacagctccccggccagcatcttttctttttcggtcatgggaattcctttccgggcgggttcagcccttcagcccccgggcctggcggtccatgtcctcgaccacgatgtcgaagatctcccccagggaggcgcagtattccagcaccagccacggctcattggtgtggtagtgcagcttgatgaggtcctcgtcccccaccaccagcaggcagtcgcccttgaaacggctggtgatatggtcgtggatgtcgtcctcgtccaggtcgtggccttcgatgaggagctgggtgtcgtagcggtattccatgtcagttgtcctcctcaaagcggatggtcacgctcttggcgtgggcatgcaggccctcgtgctcggcaaaatcggcgatgcggccctgcaccttgcccagggcgtcccgggtatagtagatgaagctggacttcttgacaaagtcatccacccccagcgggctggaaaaccgggccgtgccgctggtgggcagggtgtggttgggcccggcgaagtagtcgcccagggcttccggcacgttgcggcccaggaagatgctgcccgcgttcttgatgcggcccagcacggcaaagggatcgtccaggcagacttccaggtgttccggcgcgatgatgttggctgcgtcaatggcacagtccaggtcggcggccaccacgatcttgccgttggtgtccacgctctcccgagcgatggcggcccggggcagtttggggatctgcacttccagctccgcctgcaccgccttggccaggtccatgctgtcggtgacgagaaccgggctggccagcttatcatgctcggcctggctgagcaggtcggcggccacccaggcggggttgctcttgccgtcggccaggaccaggatctccgacggcccggcgatcatgtcgatacccaccttgccgaacaccttgcgcttggcggtggcaacgtagatgttgccggggccgacgatcttgtccacggcggggatgctctcggtgccgtaggccagggcggccacggcctgagcgccgccggtcttgaagatcttgtcaatgcccgccgtcaccgccgcggccagaatggcggggttgaccttgccgtctttgcccgccggggtggtcatgacgatctcggacacgcccgccaccttggcagggatgacgtccatgagcacggtggaggggtaggccgccgtgccgcccggcacgtagacgcccgctttctcgatgggggtgtacttctggcccagggtgatgccgggaccccgctccagcatgaaatccttgtgcacctgctggcggtggaaggcccggatgttgtcggcggccatctccagcgtcttgaggaagtccggctccatggcggcgaaagcctcatcgatctcctgctggctgacccgcaggtcgtccagctgggcatggtcgaacttgagggcgtattctttcagggcttcgtctccccgggcgcggacatcggcgatgatggcatccaccgtggcttccacatcggcctcggcgcggatgtcccggttgaggatctcctccggtttgagggcatcaaattcaaaaatacggatcattgttccagtgcctccttcatgctgcccagcagagcgtcgatggccgcccgcttgaactgatagctcgccttgttggcgatgaaccgcgccgagatgggcatgaattcctccagcacggcaagatcgttttcctttaaggtagtgccggtctccacgatatccacaatgacgtcggacagccccagaatgggggccagctcgatggagccgttgagcttgatgatgtcgatgtcccggccggtctgctcataatgcgcccgggcgatgttgacaaacttggtggccacccgcagagcccggctctcgtcgtcagagaaattcttgggtcccgccacgcacatgcggcagcggcccatgccagtgtccatcagctcatagacgtcggcgccgctctcggccaggatgtccttgcccacaatgcccacatccgccgcgccgtgctccacgtagatggcaacgtcgctgggcttgaccaggaagtacctcacccggacgtcggggttttcaatgaccagcttgcgggtgtcgttgtagtcccccgcgccgtagcccgccccggccagcagggcataggccttgtcgcccagacggcctttgggcagagcgatgtttagccaccgctcgccgtcggtctccccttccctcacgggaggcaggggggcttccagccgttccagttcgtccaggtagagggcaaagcccaggccgcaggcctccggggtgaagcggcggatgagcaggtcatactgtccgcccttgagcaccgcccggggaatgccggacagatacccgctgaacaccaggccgttatagtattccatgtcgccggccaggctcaggtccagccgggcgccccttgccgtttcgcccaggtcgttctgcagggctgtgagttcatccagggcttctcgctggccggggtagcggcagtagttccgggcagcggccagagtctgggagaagggaccattcagggtcagcagttcggccagagcatcaatgccctgttccggcagccccgctttttgggcggcctcccgcaggccatggggatttttctcctgcaaaagggccagcagggcggggcggtcggccttggccgcgccgatgccgtccagaagggccgtcacaaagcccatatggcccagctccatgacgccgggagcccccagggctgccaggctttgtgccgccagacggaccacctccgcctgttccgccgagcccaccgcgcccagacattccaggcccatctggctgatctcggtgaaggtgtggctttcccggctgggacggcagacctgctcggtgtaataatacttcttgcaggtgcccggcgcgggctgggcgtttttcgcaatggacaacgtcacgtccggcttgatggcccgcagcttgccgtccaggtcggtgaaggtcaccacctgggcgtcgggcagaaagctttcgtactgctggtacagggcatactcctcaaagcgggccatgcggtatttgcggtagcccgcctgctcgtacaagacccgcaggcgcagggtgctgcgctccgccgggcgaaatgcggtcagatccagttccatatcattcgatcccctctctattgattcatcatgcgccggcgggccgcacattcccgctgcatccggcgccgaaaataaaaaagcaggcgcgctttgcaccggtttggtacaaagctgcgcctgtttgcaagcatgtcatccctggcagccaaggtcgtcccaatccgcgaaatcctccggcaaagcgatctttgtcgggtctaccttgccgcccaccacgggcggcttttcggcatggctttccacgggattcacattgggaccgccgtcctggggccggaccggtcgataggtcacgggccgggcggccggctgctcctgctcgggggccggttgggccggagcaggcgtctccgtcggttggacgggcgcgggctgcggggcttccggcgtctgggccggggcctcggtatcatcgcaggcaggcgcgggtttcggggcctcggcggcttccatgtcagcctccgggcccttggtatgttcgtgctcctgctcgcggctgcgcagccaaagcagcgctgcgcccgcggctgccgccagaacggcggctttcagcaaacggtgtttcccggccatgcctgttcctcctttttcaaacatccataacgcccctcgggggccttatgtcggttattataccactctgctttagcgcgtgcaagtgtattcgctcaaaaaacagaagtacttcgatgatgcaagggctgcaccgggccagtgccggggagcagcagcggatcgtgcaggcagcatctttacgaggacgccgccgggatgccagactctgccctgtctcaaaccgtcaaagagacggacagccccggccaatccgtcccgccgcagtgttgtggcagctgcacggcgaaacggcggggctgcgggacgaaaaagttctctctgatctgccgaaaaagaaaggttgacatgcatattctacagatgtagaatataagcagaataattctacgcttgtagaggatgtgaggtgatggtatgtcctccctgttgactgccctgttttccgcctatgccgttcagggtgccttgctggccgccgtgacccttgtggtgctggggcttggccgcaggctgcagcggcgctacggtgcccggtggttctgccgggtgtggctggtgctggcggtgctgtttctcatccctctgcatctgctggtacccgatgccccggcagcccgtctgaccgtaccctatgccctgaccatgccccggacggctgccggttttgctgctgatgaggccttccccctggcggaggaagcagcggacggttccctcaccccggaggacgatgctattcctccgtctgctgtggacgggccgtctcaggccgttcccgtgcctcaggccgcggaagaggccgggcggcagcttcctcctctgatcgaagttgccgcagggctgtggctgacggggacggcggcggtactggtctggcagggtcttgcctggagcctgtggtaccgccgggtgctccggctgcggcagctccctgaccccgagtggcaggtcgccctggaggacgctcaacaacaggtccctctccgccgcccaccccgcctgatagccagtgcccgggtgggcgggccgctggtgaccggactgctgcgtccggtactgctggtgccggtccaggctccgccccgagagcaggccgccctcatgctgacccacgagctgacccatctgcgccggagggatttatacttcaagctgatactggtactggcggcggcagttcactggtatgacccggtggtctggctgcttttgcaccgggcgggacgggacatcgaggtcgcctgtgacgagcaggccgtggccgggaagggccgggccttccgcgccgcttacagcgacgccctgctgcgggccgcccgcatgggacgggcaccctccctcaccaccgggtttgccctgagccgcaaggactgggccgagcggctgcggcagctatgggatctgacccccaagcgccggggccgggccgccctgacagggctggctctctgcgccgtgatggcgggcgggctggtctcctgccggatgcctgccgaggattcctcccttcccgctgccaccgcttccccggaacccgacacggctcaaacgccagagagcgcccagccctcccccgccgccgtcctgacgggccgggagacggtctggccggatctggacgggggtgcttaccttgcccaggtccccgccccgctggaagagacgccctaccagcttcgggacagctggcaggttccctccctgggtctggtaggatgcgcctgcgccgacggcagcggcgggctggacatttacacctcggcggatgagggccagaactgggaccacatccacaccgacctttccgatctgttcggggaggagcctttcctggtcatgaactgccagatggtcagcgacagcaccggatttgtggtgctgcgcctgggttccacccaggaagaggctgctctgtggccctccatgtattactggtgtagcgacgacatggccgtcctgcgcaccgcggatggcggcaacacctgggagctgaccgggcgccacagcctgcccgccgggacagagcaggaaaactggcatctgcagccctttttgtgggtgaatgagaaggtgggcttctgggcaccccacaccgactacacccactttgccctctggcgcaccgtggacggcggcgccagctgggaggccctggacctgagcgccctggagggggagatcccctacgacgaggtacccggcatccatacctgtgcggtcaaactggaccccacccatcccggccgggtgcgggtgagctgttccgccgaccacagcaattccatgtatcaccgattttatattttcagcgacgatctgggggaaggctggcagatggatccttccaccgagcccatcccacccgccgctgcccaggaggagaaccgcaatgcatgaaaaacgtctgcccgatgccgaactggaggttatgaaagccctgtgggacgcagaccagcccctgacccgtacccagctggaggaacggctggccgggcataactgggccagtaccaccctgctggcgctgctggcccggctggagtccaagggctgcgtcagccgcagccgccagggacgggggtatctgtacagcaccgccctgtcgcggaaagaatatctgccagtggagagccgcagcgctctgtcccgcctgtttgatggcagcgcaaaaaatctcattgctgccatggccgagagtgatgccctctccgaccgagacatcgacgagctggaggcatacctggcccgtctcaaggcgggacgcggcgaagcggacaaagactgacattcctgttttgcgccagtggggcatgagctcacacaaaaaagtaccgggaggccccctctatgggaacctcccggtattttgattctgtaaaaatggtctgtcagctcaagggatcaatacacctttttgacagggacagtccagcccttggtgtcgggcagcttgccccactggataccggtgagggtatcgtacagcttctgggtcagggtgccgatcttgccgtcgccgatgagagcctgctcgcccttccagtccagctccttgacggggctgacgaccgcggcggtgccggtgccaaagacttcctccagcttgccttcgcgggcagcctgcatgacatcctcgatggccagcttgccctcgacgacctcatagccccagtcacgcagcagctcgatgatgctgcggcgggtgacgccgggcagaacggtgccggtgcaggcggcggtgtagatcttgccgtcgatcttgaacatgatgttcatgctgccgacttcctcgacgtacttcttttccacgccgtccagccacaaaacctggctgaagccctgctcctcggccagctcgccggccttgatggaagcagcgtagttgccgccgcacttggtgaagccggtcaggcccggggcggcacggatgtattcatcctcgacgtagatgcgtacgggatcgaggccctcggcatagtacgcgccggagggagcgcagatgatgcagaaaatgtaatgcttggaagcatgcacacccaggcccacgtcattggcaaagcagaaggggcggatgtacagcgaagcgccgtcggaatagggcacccagtcgcggtccacgtccaccagagcctcaacagcctggacgaaatcttcggccgggatcttggggatgcacagacggtcggcggaatcctggaagcggttggcgttgcagtcgggacggaacagctgcactgtgccgtcggcggtgcggtaagccttcatgccctcaaaaatttcctgggcgtaatggaacaccacggtggcggggtccagcggcaacggcgcatagggtacgatgcgcgggtcatgccagccttcgccctcggtgtagtccatgaggaacatatggtcggtgaaaatcttgccgaagcccagatgattctcatcagcaggcttggctttgggggttgcggtacgggtgaccttgatatccaacattctcattctctcctttgtccggcgagcagtgccgcaaaaacgcacacaaacggcaggcggcggccgggtcattgaccccagccggagcaatgccgcttttcccacccaaaagcaggtgcggcagactcgtcgggtttgtttgatccgttttgtaaaaggtctccggcaaagcggcgcggcccgggtccggcacacccccgtgtacctgcccgccgcgctcccgatacccccgttttgcccggggcctgtctgatacggaccttacctgtcattatagcgctgtactattccaaatacaagtgtacttttgcaatttcacgctctaaagcgtagggaagcaaagaatttttccgatttttgacgccattataaagggcgtggtataatacccagagatttgtccggcggcacgatggttttcatcccctgcgccggttattggaggaggcttctgccatgccgttacttgcgctgcttgcaagcgctgcgctctgcctgggatttgctctgctgccctgccgtgttcaaaagcgccatcccgcccgccgggactttgccgctgccggggctgtgtttgccggagtctgggcatgggcgtttctgtttttcgggaaagccggtctgtttaccaatttcggcctgttccgtctctgtgcgctgtgcgcagcctgcggctgggtttccgcctgtgtgtgcgggttccgcctgaccggtgccctgtccgggcggctgcgtcggcttgcccccgccgccctgctggtctttgcggcgctgggctttgagatctttctgggcaacgtcaattatttcgtcacccacgattatgttcccatccagttgttcgactatctggactgcgaggtggaacggggcgaaaacggcgaggtcatcctgtcgggagacagtgccgagctgcacttttccggcatcgatcagccgctgtacaatctccagctggaaggccttaacttcctttatgacggggaataccccgaccggcaggaccctctgttcaccatctcggtgacggccgccgacgaggccaacgccaacggcctggccggaggcagctgggatgtagcctggaagtcctcccgcagttggtcccgggcgctggatttctccggcaagatcagctggctgaccctgtccgccgccccgtatgacggggagtacatctggcattccttccgctattcccttaccggcatcgcggccaacgctccccagccgttcaacttttccctgctgcgctttgccgtggtggcccttgtcctgctggcagggtgggcgctgcggccgtcgggcactctgtggaacagccgctatttggatgcccccaagcgcttccgcccctgtgtagccgggctgatcctgtttttcagcctggcggcctgtctggtcccctttgccgaccccatcaattccggggtctccacttccttttataatgtaaacaactgggacggcgtcagcaccgtctacttcaccaagcacatcaacgactggcagaaggatgcctccagccagctggggtccctggcccattcgctgctgaacgggcggctggatcttgagctcgacccgcccgaggccctcgttgccatggagaacccctacgacaccgccgcccgcgccgcccaggcccccgatgccctgtgggacgtggcctactacaacggccggtattatgtctacttcggcgtggtcccctgcctgttgttccagcttccctttgaggccatcaccggcgtccaggacctgccgccctgtatcggcatgatcgtcatgaccatcgccgcggtgtttgcggctttcgggctgatcaagcaggcggcccggcgatggttcccccgcatatccgccgccgcttatctgatcgcatcctccgccgtggcgggctgcggccagctgtactacctgctgctgcggccgtcggtgtacgagtatgtgattttgtgcggcgcttcctttgttatgctagggctgtggcagtggatggccgccgccaacaccccggtggaacaccgcaaaaccatgatcgctcatctggtgctgggcagtctgtgcatggcgctggtggccgggtgccgcccccagatggagatttttgctttcctggccctgcccatcttctggaaccgctatgtcacccggcggcggctgttcacccgcaagggtgcggtagagttcgccctgtttttactgcccgtcctctttgtggctgccgggctgatgtggtacaactacgcccgctttggctcgccctttgatttcggcgccaactacaacctgacttccaacgacatgaccaagcggggtctgagcctgggccgggtggcgccggcgctgcattattatctgtttgccgttccgcttttgaaggcgatattcccctatatccacgagcttcgggtaaacaccaattatatcggccaaaccatttccgagcttatatacggcggcattattacgaccacgcccttcctgtgggtgtttgccctgctgcccgctctgcgccgccggctttcccggctgcggctgtggggcgtggtgggctggtgcctgttgtccacggtggccctgtgtgccctggacgccatgatggccggtattctgtaccggtatctcatggactttgccctgccgctcacttttgctgccgccctgtgctggctggctctggagcaggtgctggatgaccaccgcacggaatttgccgccaaacggttccagcgatttttccgcacggccatgccggtgactgtcgccgtgggcatggtgttcgggttctgccttctgtttgccgcggaaccctggctgcgcagccagagcccggctttgtatcagacggtgagccgtctggtccagttctggctgtgatgcagccctactcccaaggaaagaggttttctgcgctatgatgtttgctgccgcgctggtattgaccgccctggtgtgtctgttttttgccgcggtgcccgcctatttgtttcggcgcgggctggagcgccgggactttgtcccgggtatcgccgtctttgccgcagtctggctgtggggtatctgttttttctccaagcccggtctgacggtaaactttgacgggttccgtttcatcatcttctgtgccgcggcaggctggctttcggtctgcgtctgcggcttccggctgctgccccttgcccgcggcaagctgtaccgtcccgccgtgctggccgtgtttttgctgactgccctgggcggggaagttttcgtctgtaatgtcaattatttttccacccacggctaccagcccttccagctgtttgactatctggtcctggacgaaggccagaccgtcaccgcggacggtgtcatgcttgacccggatcatcccgccctgcgtttttccggcatcgatcagccagtctacaacctgcagatcgatgaggccatctataccaacaccgatggcgattacgccaatcccgatccctgcctgcagttcaatgttaccgcttccgatgaggccaacgcctccgagatcaccggcggccgctggtggtatgccgccgaagcgccccgcacccgctggctgacgctggatttttcgggcagcatctctaccctgaccctggattgctacaactatgaccagaatgagtgggccagctttctctggaccatccggggcatcaccgctaacacgccccggccgctggacttttccattgcacgctttgcggcactgtttgcggttttgtgcatcgggtgggcgctgcggccttccgggatgctctggaaaacgcgatactttgatgcgcccaaacgctttcgcccctgtgtggccgggctgatcctgtgtttcagtgtgctggcctgtctgtgttcctttgccatcccgcgtttttccggaatcgccacggaacaatacaatgccgtcaactggaatggaacggattccttcaatttcatggccattgatgagcaggacggttcccttttcgtacagcagggcgagctggcacacgcccttctgaacggacgcctggacttgatgatcgacccgccccaggctttgctggagatggaaaacccttatgataacggcgcccgcaaagcccaggcccccgacgccctgtgggatgtggcattttatgaagggcgatactacgtttactttggcgttgtccccacgctgctgttccaacttcctttcgaggcgctgaccggtatccggaacctgccgccaattttcggtgcgattattatgaccatcgctatgacattcgcctgtttcggtctggtcaaacaggcggccaagcgctggttccccggcatttctgccgccgcctacctgattgcctgtaccgtgctggcttcctgtgcacagctccattttctgctgttgcgctgtatggtgtatgaatatgtcattgtctgtggtgccgcctttgtcatgttgggtttgtggcaatggatggctgccgccaacaccccggtggaaaaacgcaaaaccatgatcgcccacctgatgctgggcagcttgtgcatggctttggtagccggatgtcgcccccagatggagattttcgctttcctggctctgccgattttctggaatcgctacgttacccagcggcgtttgtttacccgcaagggcgcagcggaatttgccctgtttgccctgcccgtcatccttgtggctgccggcctgatgtggtacaattacgcccggttcggttcgccctttgactttggagccaactacaatctgaccacaaatgatatgaccaagaggggattcaatgcttcccgcatcggtcctgccctgtttgcctgcctgtttgctcccagccccatctcggcaaccttcccttatgtgggcagcatcctggtttggacaaactccctggggcagaccatcaccgaaatgtgctacggcggtgtggtgaccaccaccccgtttttgtggatctttgcctgtctgccgcttatgcgccgtcggctttccaaactgcggctgtggggcattgtgggctggtgccttttctgcgcggcggctttggctgcactggattccgaaatggccggtatcctttaccgctatctcatggactacaccatgcctctgctgtttgccggcgctctgtgctggctggctgccgagcaggcactgggcgatcaccggagcgaggcacttgttccccgggtgcaaaacgttttccgcgtgtccatgagtttggccgcagcaggcagcctggtcttttctttcctgctgttctttgccgccgaaccttacctgtacaaaaacactcccggcctcttcaacaccgtcagccgtctggtgcagttctggctgtaacctttttcccgcacacaaaaggaccgccgtccctccggctgcattgccggggacagcggtcctttgcttattgaattttcttggccctcacattttgtggtcggcaaaaatggggtcgtcctgccacagcaccacatggcccgcggcacgggtggcgttcatgtcgatgatccgctggttggatgagccgcggaaccgcagggaaatgtcgtacaggtcctgcacaaaggcaccgtccaccagaatgtcgatataccccagcatctcgtcggtgacttcgcaccgggaggcagagggctgcagcagctcggtctcgtagacgttgccggtatagcaccagatggtcttgtgagggtacaggatcttgacgtcgtggagaaagctcaccagcgcccgctggttttccggctcaaagggttcgccccccaacagggacagcccgccgatgtagtccggtttgaggctggcaaggatctggttgcggacttccttgtcaaaaggcttgccgtagttaaaatcccatgcaattttattgaagcagttttcacagtggcggcggcagccggatacaaacagactggtgcgcacccccgtgccgttggatatatcacagtatttgatgtttgcgtaattcaacgccgtatcccctttcccagaatacaatatcttgtttccgtcacaggcaaaaaaccatatcctgtgcctgtccggagggttttcacacttggcagtatagcagacacccgcccgccatgcaagatgccggcctttccaaacaatcacttttgcgcgtactatcgtgtttttgtcctttttactcaaaacggccaaaattccggccgttttttcggcactttctatttttatcgttcggacgtgaaatgcccggatatttagtcatttttgcccttttcggcacaatatattgtggtgtttgctattgactttccccacctcccgcggtaagataaatgtgctcgcaaacgcaaagttatacgttctgtataatttatatacagtatcacagcgcattgtaccggcgtggctgcggtccaccgcgggtaccagtattagaggaggagccccatgaagatcatcaagcgcaacggcagtgaggccgtatttgacatttccaagatcattgccgccgtcaccaaggcgaacaatgtggttgaggaagggatgcgtctgaccaaggagcagatcctttccattgccgacaccgtccagaaaacctgtgagacccgcagccatgccatgggcgtggaggagatccaggacctggtggaggacggcatcatgagcgccggtgcctacgaggtcgcccgccactacatcacctaccgttacgtgcagggtctgcgccgcacccacaacaccaccgacgaccgcatcctcagcctgatcgagtgcaacaacgaggaagtcaagcaggagaactccaacaagaaccccaccgtcaactcggtccagcgtgactacatggcgggcgaggtctccaaggacctgaccatgcgcatgctgctgccccaggacatcgtcaaggcccacgaggaaggcatcatccacttccacgacgccgactactttgcccagcacatgcacaactgcgacctggtcaacctggacgacatgctgcagaacggcaccgtcatctccggcaccctcattgaaaagccccattccttctccaccgcctgcaacatcgccacccagatcatcgctcaggtggcgtccagccagtacggcggccaaagcatcagcctgacccacctggctccctttgtggacatcagccgcaaaaagatccgcaaggatgtggagcgggagctcaaggagctgaacgtcagccccagcgaggaaaagatttcccagatcgtggaggaccgcctgcgtgaggagatcaagcgcggcgtgcagaccatccagtatcaggtggtcaccctcatgaccaccaacggtcaggcgccgttcatcacggtgttcatgtacctgggcgaggccggtgacaatcagcgcctgaagtccgacctggccatcatcattgaggagatgctccgccagcgctaccagggcgtcaagaacgaggccggcgtctggatcacccccgccttccccaagctgatctacgtgctggaggaggacaacatccgcgagggtaccccttactactacctgaccaagctggccgccaagtgcaccgccaagcgcatggtccccgactatatcagcgaaaagaagatgaaggagtacaagttgtccaagggcgagaccgagggcaacggcgacgtctacacctgcatgggctgccgcagcttcctgacccccgaccgttccggcaacggctgggacaatgtggccaacgccctgaactacgacggcaagcccaagtactacggccgcttcaaccagggcgtcgtcaccatcaacctggtggacgttgccctgtcctcccacggggattatgacgacttctggaagatcttcgacgagcgcctggacctgtgccaccgcgccctcatgtgccgtcacgagcgtctgaagggcaccctgtccgacgccgcccccatcctgtggcagtacggcgctctggcccgcctgaagaagggcgagaccatcgacaagctgctgtacggcggttactccaccatcagcctgggctatgcgggcctttacgagtgctgcaagtatatgaccggccgctcccacaccgaccccgccgccaagccctttgcgctggaagtcatgcagcacatgaacgacgcctgcgcccgctggaaggctgagtccaacatcgatttcagcctgtacggcaccccgctggagtccaccacctacaagttcgccaagtgcctgcagaagcgtttcggcatcgtgccgggcatcaccgaccgcaactacatcacaaactcctaccacgtccatgtcagcgaggagatcgacgcctttaccaagctcaagttcgagagcgatttccagaagctctccccgggcggcgccatcagctatgtggaagttcccaacatgcaggataacctggaagctgtcatgcaggtgatgcagttcatctacgacaacattatgtacgccgagctgaacaccaagagcgactactgccagtgctgcggctacgacggcgagatcagcatcgtggaggacgacggcaagctggtttgggaatgccccaagtgcggcaaccgtgaccagagcaagctgaacgttgcccgccggacctgcggctacatcggcacccagttctggaaccagggccgcaccgccgagatcaaggaccgcgtgctgcatctgtgataactaataaaaaaccggacgatgccccgtaaccggcattgtctgaataaagccgtcacccccatttgccgggtgacggctttcctgtatttttcccccacacagacaggaggtctctcatggattggctgctgatgaaccgcgatacgccccttttgtacttttgcagttccatagacctctacggcgacaccctggtacaggagaaagcctggctctcccccttgcgccccctgggatacccggggctgtggaagcttctcacccggcggcgggcatccacgcaccgcaaaaacatgggcaggctcctggcggactgcggctgccgtactctggaaggctttctgcgcatcacccacgctgcctccctgaatgacacgttctgggtgaaggaggccgactctcccctgtgctgggcggaggtatccctgtatgccaacgcctttgatccgggcattgccggggctgccctgaccggcagccccacccccgctgtcctctccgccccttcccctgagttcaccaccggcgggcgctgtcccaaatgctggcagcgggacagagacggcatccatctgtacaaggccggcagcgccaccggcgggtgggaagccctgtccgaagcgctgtccgcccagctggccgcccttttgtgccgcggttttgtggattaccggctggatgtctgccagggtcggccggtctcccggtgccgtctgttcacctcggaggaggtagggttctttccagtggcccatgcagggccggaaatgcccaccgtttcccggctgctggaatggttttcccggaccggctgcgaggatgatttccgccgcctgtgcatactggatgccctgctcctcaacaccgaccgccacccgggaaacatgggcctgctggtgcgaaacgccacccaggaagtcctgggcatggcccctgtgttcgacttcaaccgtgccctgctgtccgacctggacgatcccctgccggctgcccccggagactccgtggggcggctcccctggtttggccgggatttcatcgccaccggccgggggctcatgaccgacgccatccgcagcgacctgaaaaatctggaaggcttccggttcaccttgcccgcttcccctttcccggtggatcgcgggcggctggaaacgctcagcgcggtggtaaaccaccagatccaacagctgctggcgtgagccgggcagccgttccacacccgttcacctgcttgaaccattgcaaaaggcccgtggcctgtctcaaaggacaggccacgggcctttgtcgctttttgtgttccgccgggcatcagaccatctcgatctggcacagcttcatggcgtccagggcggtccggtggctttcgggggtcacgcaggcacagcaggacgccgccacccggacgggcgtctcgggcagcacggccttcgccagcagggcgttgctgatgacgcagatgccggtgcagacgccgcagaaagtgatgctgtcgggcttttccgtggccagatagtgggccagggcggtggagccgaaggtcggcttgtcaaagacgggagcttccgtcgccaggtcctgcagctcctccacgatctgccagccctcgctgcccttgatgcagtggggtacgggcaggttgcggccctcctgggtgttcatgtaatcggggccgtgggtgtcccgggtaaagaccacgggtccctgccagccgtgggccagggccgacacgtccggcaggatggcctgggcctcggcggtccccagggcgccggtgacaaaatctttttgcatatccacaacgacgagcagatccttggacattttcacattcctcccggtcactggtcacagatgcaggcgtttttgcagttcggcccagagatcccgggccttgaagatagccaatcccaaaaaggtgatgatgctgacgatcaggcagataagccacagccccggcgtatggctgggactgatgagcagcgccacgtagggcagcacgccgatgacgatattgagcagcagatagaccagactgttctcggtaaagcggcggttgacaaaggcaaagataaagttgagcaccagagccacggtgcacatcaccgggatgatgaggtcgatgctgaaccggtgccagccggtgaccacgtcgcacaaaagcagcaccgccgacacaaggatcagcgtctggaacagcagcttgggtgcgttgcggcggcgtttcatcagggtgcgcagcaagatcagcgtaccggccacgccgatgagcaccggaaggctccagtgcatggcgctgtccagcacaaggaaatccaccgccatgcagatgatggtaatggtcaacagcacaaaggcgatgatcttatatgccagcgagtaccgccgcagttccggttccacatggggatagcgggcgggctctccctcccccaggagctggctctggcacagagggcagtattccggcgatccgcccacccggattttgcagtttggacaagttttcatcctttttccacctcggtcgcatagagagtgagatccaggccgtcctgtgccatgccgcccaaaaagcggcgcagcacgccggtgccgcggtaagccgacgagatccccagcaccagatcatcgtgccaggaactgacgcagacgaacatggtggaggtgctggacatggcggtaaagccccgcagccaggggtccagttccgccggggtcttgatggaccccagattggacagggtggcggtcacgcactggttttcccgccaggtgaacagttccaccgtcttgttcttgatgaacagcggcaccggcttgatgccgggcatctgttccagctgttcaaagctgtccatccgggccttgacccgctcatcggacagctcatatttgagggtggcgtcaaagtcggcagccaggctttcgggggtctcggtgccgtcaaagacatggcctacccggatgctgttgaaaaagttccgcgccgttgccgaggggtaatagttgcgcaggttgaccggcaggctgatgaccaccgggcgtttgcgttccagcaggggcgcctccgcatggatggccagcatcagccgggcacccagccagctggtcagggtgacgccgtccgccctggcccggggcagcagctgcttgacgtccagatgggcctcaaagtactgggtctggtcgtagggcagtttgatggagcgcatccggtacgcccggggcgctttcccgcccgggctgcgcctggccccgtaaaactggcggaagctgtcctgggccaggtctgcctcgggggcaacgctctcgggcaccatgtgggccagggcttccggctcggtaagtttcaggtaatggaaaaccagcgccttgaggaagatcaggccgccgttgccgtcgctgagggcgtggaacatctccacattgatgcgcgggccgtagtagctgacccggtacagcagctcgttttgcagttccggcccgtagaccggcgcacagggggccagctgttccggcacggcgtggggttccttggacgtggactccagataattccagaacagcccccggtgcagcgtgacctgaaaactgggaaactgccgcgccgtcatccgcagcgcttcgtccagacgttcgccgtcaatgtcggcgttcagggtgcagcttacccggaatacgcgggggtcccgccgggagttggtcgcaatgaacacttttgccacattgtcgacccggtaccatgtatgggccatctgtcgttcctccttctcacagcccgcaggctgcgcggccttgtgccgttacagaatccgctgtacgaaccgccccacgctctccatggcctgcgcggcgcggcggatgggcatctgctggaacacgtgccagcattcgtcgtacacttccaacacggaatagacgttgctttcctggaatttatgatgcagaagctccgaatcggagcgcaaaatctcgttggtgcccacctggatcagggcgggagggaatccccgcaggtccccgaacagcggcgagtagcaggggtcgctccagtcggcgtcggggccggtgtatgccgcccgcaccgaggagatatactccgccgacagcatggggtcaatatcggcgcagtcggtgtgggacagccccgaacaggtcatgtcggtccaggggctcatcagaatcagcatacgcggctgacgccgtccctgttccttcagtttcaggcaaagttccaaagcaaggttgccgccggccgaatctcccgccaggatcacgtcccgggctcccacgcccatatgcatcaggtggtcccacacctccagggcgtcctggatggccgcgggatagggatgctccggggcaaggcggtattcaaaggacagcacgtcgcagccgctggccagggccagcttgcttgccaggatgcgggcatagcccagctggccgcaggtatagccgcccccgtggcagtacatcaccacatggcggcggtcatggccctgctcgatgctgacccactcggcggggatggcgccgatatggaacggcgaagccttgaccccgatggagggcgtcaccagcttggcgaacagttcctgcccggcgcgctggcgctccaggtcctcgggctcggtggagccgctgctggtggccgagtgcaccgctttgatggcccgcatcatggggccgagagaatcatcgtcctgtccccgctggggaatgagctgacggagagccgctcccaggcgggatgccgtgtcgcgctgcttttcttctgccatggtcgtttcctttcttacggttacggagaaactgtctcggggcgggccgggtcacagccgcgccagaatacggacccagatgctgcgcaggatgggcggatgggccgccgggaagcagcacaggcggtagaccttttccctggcggggaaggccccgcgctttgtgtaccagcggtagagcaccggcagctgccggtttttgcctcccggcaggtggaagatgcacaccggatcgttgcagtagttggtgctgacaaaatagaaccgcgcccccacccagtagcggaaaatgtaagcgttggcggcgcgcaccgggcggcctgccagcaggctgcggtaggccgcggcgcaggtgatgaactcgtcgccttcatgggggcggagttccttctcgttcattttgtcgtagacggcggagcattccgccatgaaatcggccaggcgttcccggctgccgcagatcagctcgccgccgaaatgggtcagcaccggctccccgccgtacaatacgccgtagttgcggctgatggccgccgccatgggctgtcccgccgcgtggggcacctgatagagcatgaccgcctcgtcggcttcccgccagaggtcggtgtaaggatactgggtgtaggtatccacgtccagcatcaggcagcggcggtaatcggtattgcgcaccacccagtccagggcgcacagtttataaaaggccagggaccattccagcgccgcgtccacccggaagcggtcgaagggacagtccatcaccctgacgcccccggcagccagctgccccgcgtagggttccggcacggcggcgttggtcaccagcgccacctcacagtcggggttgcaggccttggcgctgcacagcgccaccacgatgcaccggtaataggcatcgctgcccaggttggcagcgtccccttcccggtggccttccagcgtggcgaaggctccgaaaatcaggttttccatctataaaatccccctgtcgtttcaaaccagcaggcccagcgtgcccgccaccagcagtatcaggccgatgcgtgcggcgcgcggaagtttttctttcaggatcacatgggaaaatacgatcgtcaccacgatcgaaagtttatcaatgggcgccgccagcgaggcgttgatcctttgcagggcggcgttctggcacagccagcttgcccccgtggcgatgccggacaagaccaggaacacccagccgctggccccgatgccccggatgccccgcgcagcccccgaagcgccggtgcggaccagcaccatgccccaggccatgaccagcaccacagtagtgcgcaccgccgttcccagggtggagtcgatgccggtgacccccagcttggtcaggatggaagtcagcgccgcgaacaccgcgctggcccaggcggcaagcagccagccccgctccgactttccgccggcgtcatgtcccggcaggcccaccatcatcagcgtgccgactgccatgaccaccatgcatacaacgccccagggcgtggggacctcccccaggatggggatggccagcagcatggtcaggatggtactgctcttgtcaatgggggccacccgggccacgtcgcccttttgcagggcggcaaagtagcacagccagcttgcccccgtggcaaggccggacaaggtaaggaagatccagcttttgagggggacctccgccagcccgggcagcagtccgcccagggcggcgatgccccaggcaaacaccagcaccaccacggtgcgcagggcggtggccagggtggagtccacgccggtataccccagcttggccaggaccgctactgcccccgcaaacaaagcgccggcaaatgccagcagaattccggtcgtttcctgtgtcatattccatcaggacctttcggctgccggaccggcagcgatcagcggtgcagaagatcctgccccgcacagcgccaataatagtacgcgccgtttttggcatagcgccagaactgtttgggttcccgccagatacggtaggcccattccagcccggcccggcgcatccattcaggtgcgcggcggacctggccggtgaggaaattcatggcggcgcccaccgccagcacccggatgcctttcagctcggcggcgtgccgcatgacccagtaatcctgccggggcgcgcccagcgccacccacaggtaatcgggttttgcctcccggatgcggcggatgtcctcttgttcctcctcctcggtcagagggcggaagggcggcgcatgggtgcccgccacgcagacccccggccagtcccgttccagggcctggcacaaaaggtccaggttttcccgggtcgttccgtaaaaatagtggcgtgcgccggtattgcgggtggcatccagcaccaggcgcatcatgtcggggccgctgcaccgctcaatatcggtgagggacgggtccagtttgcgggcgcggcggaccaccggcatcccgtccatggcgcagatggtcatgccgttgagcaccccgcggtagtcggcgtcccgggccgcctgggacaggctggtcaccggggcaaaggccgccgtccggcactggtccaccgccagcggggcggtcagctcccccagcagttcctgccgggaggccgcgcagtaccgcacgccgaaaatggtgatctcacgcatacaagatacctctttgatccttcgttacagattcacaaggcccaggtcgtgcagaatgtcggtccgcgtctccagcgccagggcggcaatgcggcgcacccgttccggcatcatgtagggcgccagaccgctgatggagaaggcgctgtcggcacggcctcccggccccgggatggacagcgccacacagcggatgcccagctcgttctcctcgtcgtcgatggcatagccccgggcacggacctcctccagctgagccagcagggcgggcagctcggtgatggtatggtcggtgagcttgcggggcttgctctgcttccagatgtcctccacctcggaagtgggcagcgtggccagaatggccttgcccacgccggtgcagtacagcgggctgcgcagccccacccggctggacatgcgcatggggccgctctccgttttataaatgtaaacgatgtcccgggcgtcccggatgaccagatgcaccgcttcccccgtgcgctgggccagccgctccagatgcagctttgccacgcccatgatgtccatgctgttgacgatcccggaggaaagctcaaacatttttagcgtcaggcggtacttgccggtgacgctgtcctggcgggcgtatcccagctgcaaaaggcttgccaacagacgatgggtcgtgcttttggcaaggcccgcctcggcggccagcttttgcaggcccacccccgtgggatgggccgccagcacctcaatgatgccaaagatccgcgctacgctctgcacaccgccctgttcggtcttctccgcggcgttcgccatgtaagagctcctccttcaaaaaattaacaaaaaattcataatttcccgtcggaacctccggcaggtccggttgttccgtatgatggaacaagtataccagcaaatgcgacttttggcaacccgtcataccaccctgcggaacatggtcccccgcaggggtaaaatccgccatttcagcgccaaaacaggccgattgacggggccgcgcggcctttgatataataagttcaagccaaaagcggaacgcggttccgctgtatggaatggtaaaccaagtatggcaaaaaggagaatgtggtatgaatcctgtagtagagcgcgtttacgaaatcggtatcatcccggtcatcgcgttcaacagcgttgacgaggcagtgcctctttgcaaggcgctggtcgcgggcggcctgcccgctgcggaggtcaccttccgcaccgcctgtgctgaggaatgcatcaagaaaatccacgccgaagttcccgaaatgctgctgggcgccggcactgtcctgaccatcgatcaggcagaccgtgccatggccgccggcgcttccttcatcgttgcgcccggctttgaccccaacgtcaccaagcacgtcatcgacaagggcggcgtcatgatgcccggcacctccacccccggtgagatgcagcaggccatgaacctgggctgcgaggccctgaagttcttccccgccgaggccaacggcggcgttcccatgctgaagaacatcggcgcggccctcaagaccgccaagtggatgtgcaccggcggcatcaatgccaagaacgtcaacgactacctgggctacgaccagatcttcgccgtgggcggcacctggatgtgcaagagcgacaagatcaaggccggcgcatgggacgagatcaccgccatgtgcaaggaagccgtcgacaccatgctgggcctggaactgggccacatcggcatcaactgtgccgacgacgccgaggccatgaagaccgccgagaccctgggcagcctgctgagcatggccgtcaagcccggcaactccagcgtctttgttggcaacaaagagttcgagatcatgaaaaagcccggccgcggcacccacggccacattgccatcaagaccaacaacgtcgaccgcgccatctatcacctgagcaaccgcggcgtcaagttcgacatggattccaaggtcgtcaagaacggcaagaccactgccatctacatggcggacgagatcgccggctttgccatccacctggtccagaaataatcacgcgggaatttttacccactgtattggaatactaaacttatacgataaggagacatcttcatgaaagtcgttacttttggcgaactgatgatccgtctgcagccctacaactacgagcgttttgttcaggctgaccacctggagttcagcttcggcggcggcgaagccaacgttgctgtttctctggccaactacggcgctgacgccgtctacgtgaccaagctgcccgcccatgccatcggccaggcggctgtcaacagcctgcgccgttacggtgtcgacacctccaagatcgtccgcggcggcgaccgtgtgggtatctacttcaacgagaagggcgcttcccagcgcggctctgtctgcatctatgaccgtgcccactccgccatccaggaagcttccaccgctgatttcgactgggattccatcttcgagggcgtggactggttccacttcaccggcatcactccggctctgggccccaatgttgtcgacatctgccgcgaagcctgcaaggctgccaaggctcatggcgtcaagatcagctgcgacctgaactaccgcggcaagctgtggacccgtgaggaagcccgcgctgccatgaccgacctgtgccagtacgttgacgtctgcatctccaacgaggaggacgccaaggacgtcttcggcatcgaggctgaggccaccgacatctacgccggcgagatcaaccgcgagggctacaagagcgttgccaagcagctggccgacaagttcggcttcgagaaggtcgccatcaccctgcgtgagagccattccgctttcgacaacggctggagcgccatgctctacgacgttgcttccaacgagtactgcttcagcaagaagtacgagctgcacatcatcgaccgcgtcggcggcggtgacagcttcggcggcggcctgatctacgctctgctgtccggcaagagcacccaggatgctgttgagttcgcagttgcggcttccgcactcaagcactccatcgagggtgactacaacatggtcaccgtctccgaggtggagaagctggcgggcggcgacggttccggccgtatccagcgctgattttttccttaactttcccgtttacggtttaccttccaaagaagaaagcgacggtgcgcccgtcgcttttttctttttgccgtccgcaaatctttacaaacgctctacttgacaaaggccacgccgcgcggtacgcttttcataaaagagttagccatacctgacacatcttgtttacaaggaggagtcccgtcctatgtcgcacacttccaaccgtctgcgcatcatgatgcagtgcgctctgttcgcagcgctgaccgcggtatgcagccagatcgccattcccaccccctggggtgttcccatcaatcttgcgctgttctcggtgtacatggccggcaccatgctgggcgcagtgggcggctttgtcagccagctggtctttgtctcgctggcagcggtgggacttcccgtcctggccggttttgcgggtgggcctgccgccatcttcggcctgacgggcggctacatcgtgggctttgtgctggccgccctcatcgtaggctttctggccgctcacggcaagcgcaccgtccccttcctctgcctgtatatggtggtgggctgcgccgcctgctacctgctggggaccatctggtactccaccttgtccggcaacgggttctttgcctcgctggccgtgtgcgtcctgccctatctgccctgcgacgtgttcaagatcctgctggccgccgtgctgacccgcgccctggaccgccgcctggccgtatccagaaaatgatccttttttccgccgcggaccgcgaaagaaagtcttttgcggcccgcggtttttcttgccagtgatacggccggatgctataatgtgaacagtcagacgggttttgtctctgccggttttccggccttatttcgccaaaaggagccagtatgccaaaccgtaaaaaaagttccgagtcccccgcccgccccgccgcaggccggagacgcggcccccgtattttgtatgccgtaacggtatgcgtcctttgcatcgccgccattgtactgtgcatggtggccgccgggcacctggtcggggtcgaactgatctccgactccctgccttcctccagctccgccacccctgtcaccaccaccgcttctgttccctcggagcgcggcaccgagatccctgccaccatcacggtgccggataccattgccccggagacggagatgcctcttgtggtcatgtgccacggcttcaccggcaaccgggacggcgacgggcatttccagcctctggccgacactctggccaagagcggcattgccagcatccgcatcgacttccccggcaacggagaaagcaccgaggactttaccgcctacaccctggacaatatgtacgacgacattgagtcggccatctcgtatatgcgcggcagctataccatcggcaagatcggcctggtggggcacagcatgggcggccgggtcgtgtcgctgcatttgagcgacgccatctccgccgctgccctgtggagccctgccaacggcaacggcctggacgggttggagttcatcaacgacacggcagaaggccgggagcagatgcgcaccgacgccgccgagaccggcgagtatgccatctccggctggaacgtgaccatcagctcggactttattgagcagatggaccgaagccaccccgccgacagcatccgggactataccggcgcgctgctggtcgcctttgcggggggcgatctggacctgctgagccagaccaccatcgacgacacgctgcaggcggccaaggaccgggaattggattttgtggacctctcggatcaatttgccgatgccacccacaactacaccgcgcagtcggaggatgaagccgagactgccgagatcagcgccctgctggaaaacagcaccgctgaatttctgatcgacgctctgctgccggaccaggcggcctgaggcgttttggaaaggacattgcatgaaactgattgccgtagactatggcgaggcccgcactggcctggccgaatgtgaccccggcgagctgatcgtcacgccgatcacgccacagatcgaggaaaagagcatgaacaaggccgcccaggccgccgcggacgctgcccttgcccggggcgccggcgcgctggtggtgggtctgcccaaaaacatggacgggtcggagggcacccgtgccgccaaatgccgccgctttgccgcccgcgtggccaatgccgccgggctgccggtcatcctgtgggatgaacgccgtaccaccgtctcggcggcggcgattttgtccggtaatgacgtgttcggcaaaaagcgcaaggaccggctggactcggtgtccgccgccgtcttgctggaaagccacctggcatggcgccgccagcatcccggggagaatcctcccgacgtgatcctgcccgagccccctgccgaaactgccgactgacggcagccattcccgcgcccgtaaggcgcacatcaacgatcggaggtttttccccatgtccaacgagagtatcccccgccatgttgcgatcattgtcgacggcaaccgccgctgggcgcgccagcgcatgatgcccgccagcctgggccataaagccgggtttgagcggctgaaagagatcacccgctacgccctgtcggagtgcggcgtcaaggttttgagcctgtacgttttttccaccgagaactttgcccgtgaccccaaagaggtcggctacctaatggatctgtttgccaacaacttccgcaccatcgccgacgagatgaacgagcgcaactgtcaggtcctgttcagcggccgccgggatggtctgcagccccgggtctgcgacgccatggattacatgatggacctgaccaaggacaacaccagcggcatcgtgaatttctgcctgaactacggcggccatgccgagctgaccgatgcggtgcgcgccattgcgggagaggtccagaccggcaccctgtcccctgccgacatcaatgaatctaccgtggaatcccacctgtaccgccagctgcccccggtggatttcctgatccgcaccagcggcgagcagcgcatctccaacttcctgctgtggcaggccgcctacgccgagttctacttcacaccggtgctcttccccgatttcgacaagggtcagtttgacgcagccctggcggaatacgcccgccgcgaccgccgtatgggcggggacaccaagaagaaataaggcagtcccgccaggtcacggaccttgtatttccgttaaggcatataccgtcttgcccactctgccgattttcttgtctctcactttttgataaaacaagcccccgacccttctgctgtgtccatgcacagccagaagggccgagggcttgtttcgttttgctttccgttcaggcggctgtcattcccctgtgctgtcgcgacccgcacaccgggctgccagcatcatggggacaaacacggcggcaagggtgccgaaaaggtttaccgcccatcgcaccgatggcccgtaggccgggacaaaagccgccagaaaatagtccgctccggggaataccaggctccatgccatcacactccagaagccactctgcttgatggcccgccagttccggtttgagatccgtatgcccatgagctgtatgcggaaaaagccgttgctgtagctgcggatgatgttctcgtcgtagtaggcaggcaaggtctcctcagtcatggccagaaaaacggccaggaaacaccccagcatcgacatagccatagacccgccctgactcagactggtcaggacaaagtgttcgggacggccgctgagcagatacagcacaaagaattcaacacagatggccgctgtcatggccagccagcacagcaggtactttctgtgggcggcgcggtcttgttccgggctgccccgggacagcttgagggaatccgccaccagggcatccacctcgttcaggtccaggcgggtctccggcggcagagcctccccccgcagcagttcggtcaccgtgacccccagcgcatccgccagcggttccagcagcgcaatgtccggcaggctgagtgccctctcccatttgctcacggctttgtccgagacgtggagctgttccgccagctgacgctgggtcaggcccttttcccgccggcgggacgaaatgaatgccgcgaacctgtttttgtcgatcatggtcggatactccctttcccgacgggctgtgttcaggaagagccgccgcccttccgcctgtctgagaaaaggataccgcacccgcggtaaatgcgcaaccgaccggcggtagaatcacgatgcagcatccattttcaaccggtccgtctggtcaggcgtccctgtccggcagggcggccgtcagaatccgagggggaatttcccctgtctaaagcacgcaaaaagcggccgccgcgccgggtaaaccggagcggcggccgccgttagcatctgaacttgtcaggctgcgagattacagctcagcgaagtacttgatggtgcggaccatctggctggtgtagctgttctcgttgtcgtaccaagcaacgacctggaccatcatgcctacgttatattttccccattttcttctgttttttttatttttaaccgctatcgtttcagtcgcagaaacattcgttacagtatcagtttttaactgtttttatggacaaatcgaacatatattttaatcgattgattatcacaatgaatgaaccttcatctgatatatatgaccgtagtaaagattctaaaatgaaatttgtatattccaaatttaaaattggctatccctctcgtatttttttaccaacctataaaatgttggcttagtcagtcctgtctcctgcattgccgagactgctgttatctcgcctttcttccatatagcatacactttctcccaattctctgggaattttttttctggacgtccaaatttaacacctttattctttgcaatttcaattccctgcttttgccgcttatgaatattggctcgttctttttcggctgtataacttagaatctgcaatactaaatcggcaatgaatcgattatccaagttctcattgctctggcttgtatccaataacggcatatcaagaactcggatatccgcgcctatgtcggcggtaatatacctccattgttgatgtatttctgaataattccgtcccaacctatctagagaaagaataaccagtaaatctccttttcgtagcagcggtgcagtttcttttgtcccaaccagaagattccaattctttctatcaaagcttttcccgctagctttatcgcaaagtatgtttcgctgtggtattcctacttgctgcatcgctactacttgtcggtcaagattttgttctgtagtacttacccgacaatatccccacgtggtcctttccatttttcgcctcaccttctatagctcctttatagtatagcatggaaagtatcaaaaagtcaacacacttttgatacgtttcattttctgtgttttcactttttgaaaccaagaaacacccgcttttaaagcaaaagcgggtgtttctttaagtatacatttagaaacatttatttaactataattcaacaagattgattttttgttgatggcgcaccttatatattacgtttcctacacaccatgctattattacgcctataatttgagctacaatatctaaaaaatcgaatgttgcataaacaaacggcaacatttgaaatagttctacagccacagcccaaaatagccccgtatacaatgctctgtttaaattcgcatatttcactatcaaagcacattctagagcatacgaccataaactgtctaccatttgattcttaagaaacgctgttaaaaacgtatttccctgtattggatggtaaatgatatttcgtagcatagaaaagattagcacgtgtgcttctaaaaaattaagaaaccagtctttacgtataaacagatagatagaaatcgctaacgctaatgccataaaagcattaatgagcatgacagctccatcagataacttacccttcatctgcaatcaaaataactcaggaaaacagtatattaatgttccaaaaattataattgcaacagcaagcactcccgataccatctgatgcctctcatccgatttcgccattgcttcttgctctttttccgtgacttgctcatacattccaacaactatcgcctcataaatatctgaatctacttttataaggctttttcccgccccgtttttccaaacaatttcagcaataatttgtttttgattcattcctgcaatggctccagctggcccgaatacagcttgccccaacgaagcatcagcaatattgttcaccgatgattggttgagaggggttacgctttctacatataacttatttatgtagccacccccactcacaaatgcaaattttttatttgtagactttataatctcttttccagtataaagaccgcttaatacaacatttatattttttgccattcttaatacacctctcacgtcgactttgtactcgcagtgggcgtctgcaccattatttaacaataatgatatcacatttatgtttatttttcaacatattttagtcatataatataatccaaagaattgtcataatatccataggtggtgatactatggacgaattaaaaatcacaaaaaagactgaaccaattatgtttactattcgtgtagataagtctattgttgatttttatgatgatttagcaaagaaaaccaaccgttctcgaaacgaactaattggtttggctttagaatttgccaaagacaaaattattgttgaatcataatttttcatatacaaatatcaaaatataaaataaaggcgtttattcttttctgcattttaagcagaattgaataaacgccttgtttattataaagataggcaagtcaaactatatataattgctatgccctccgatttttctattttataaattctgttgatactctctgactttatttcacgctgtcatagtctcaatcagaatatacttcttttattgctttctattcaatatactatttaattttcttatataatattttttctctataaggaaaagccccaaaacgccaggttttatcggcatttttcttcctgtttagcaggtccaatttgctaatcaatactcaattggttagccattgttgaaggagccccctcattcttttagatggaaggtaaatatctattgttaatccgtctcgaatcctagaacgccacatccattgaagtagtgatgataaagcgaagttatcatcttttatatttccaccgtgggaattgatatatagcttaattaccggattcagatacacattaagggtatatgctaaagttttcttttcacggtattgatttgtcgctcttgcattacaaggcacaaatccttttgcatatccattcccggataaggatttctttttactttttagacaagtccacatattatattttgaacgtgagtgcattacatttctaaagaaattgtacaaggcattttttagtttttttacttttgccttatttctaccgttttcaaaccatgaggaagaaagactatttctctcctctccaatcctatttaagtttccatcatagatattgataagattggcaactgtagatttatcactaggtttataaccatactgcaaattctgattttcaatattccaaaattcgtacggtaattcttccatttggcaataggcatccataagagaccccacaaacaaatatgttaggacgaatattgtatcaaatgccctaaaaatatccgccgggaatttccatatagtttctcgctccgaaaccatttctaatgttcttgcattcattaatcttttaacttctgaaaaaacaccattttcatattctgtattgttccaacaccaatatccattggaatcgaccttagctagtttttgttgttttattatcatccagtcactttgtgataaacaatagatttcaattaaatctattgtttcatccaaaattaaagtatatttattttcccgtatatcatcatagctatccaggccaatccttttaaatagttcatgcgaaatacatatattggctccttgacttaacaaaattttaaagtggatatacttatttggatattcttgcccacttggcatataaaaatgtagatttggacactcagaaactaccctttcgttctcctctagataaggagccacataaatgaatttcttatcttggttagaattcatataattgatagcagcattcgtttttccagttcccataatcgcatcaacaattcttaacatctttatattttattctcctctaataacatacttccatttaaatccgcctgcgctctcacgcagcccacgacagcacttactaatattggatggacttattccaaggttacgggctgctatggatatataatcccatttttttagaaccacgcccttcaagtcacattggtacacctctctgccacgattgcctctggagattgccctccttgtttctaggcttaccgtgtgccctctgtgactatttcttaatctcttaagatgcatacgctgattacagttatatctcgccgtgccccattgtaggttttccaatcgattattatctcttgattcatcaatatggcacacctgaaagtgccgcatattttttataggtttaaaactcattaaaaccaatctatgaacataaaagtttttagggattccttgatgatatagcctataggaatagtatccatttctctgtctttgttgagacaatagcatatgccgcttcctactccaacatctaccattcgaactgattgcataatcggggaaacctttgattaaagcccatttttcatctatctcaagttcaagttgactgtttgctgccgggtcaaatttaaacaaatcaatcaagcgtggcgttctcaaaaaataaattctattcatatttttcctttctgtataaaatattttaatttttaagtatttttatactatttgtatattttgtatataaaaaatatccctctgcgattcaaccattcgcagagggcttatgtaactcagcatatacctgtttcttggctgtgataaaagtatagcacagcgccacgcgtttgtcaatgagtttaataaaatattataccatattttttgtgatatgtcaatattaattttaaaaatatttttccaaattcataagcgggctattcatttcaccacgtcgtacaatttccttatcctttagcccttgtaaatagcgctgcgttatggagatgttcgtgtgtcccataatgcgactaaggctatacaaatccaaaccattttttaattgtatctgtgcaaaagtgtgtcgacatgtatgtgggctaacccttactgcatcagatacacccacttccttcgctgcctgttttagcatcctagcaacagcctcacccgtcaagggctttcctgtcttgcttaaaaataaattttcacatcgagtttttttatttgcaaagtaaccctgccgaacccgaatatatttcatcaattgtctgcttagatagggggatttcggaaccacccgttccttatttccttttccatgcttgactaggatataattttctgcaatatcttcttgcttcatcaaaatcatttcattgcacctcattccggtatcaaatagaagcgcaataatagttttatttcgaatactaagaaagtcattgcctgtatagtattttaaaagtttcttgatttcctcctcattaaatgtttctattataatttttggttgatgaacatttctaacctttttcataatattatcagaaatatagttctcttcctccaagtaagaaaacattaccttatacgccttcaagaggtcgttgatgtatgctggtttacagccatctgcctgcttagctctcataaaatcccgtatatctttcgcagtgatttcttcaatctcggattttcccttagtagcaagataagtgttcaaaaaggataacgaagctctatagtttcttatagtccctttggttaaatgtctacattcacaatcatacaaaaattctttcatggcatctgaaagcaacacaaaaagcccctccttctgttgcacagaagaaggggcaaagttgttctatcgttgtcgtagttgattcagtatgtttgcagcacgcaaacaatgaaccaatgcaaagaagccaacttttttacgctatagcgcttgtaagtgcgagattacagctcagcgaagtacttgatggtgcggaccatctggctggtgtagctgttctcgttgtcgtaccaagcaacgacctggacctggtaggtgtcgtcgtcgatcttggtgaccatggtctgggtggcgtcgaacaggctgccgtaacgcatgccgatgacgtcggaggaaaccagctgctcctcggtgtagccgaagctctcagaggaagcggccttcatagcagcgttgatgctctccttggtgacgtcggtgcccttgacaacggcgaccaggatggtggtggagccggtggggacgggaacgcgctgagcagagccgatcagcttgccgttcagctcggggatgaccaggccgatagccttggcagcgccggtggagttgggaacgatattctgagcaccagcacgagcgcggcgcaggtcgcccttacgctgcgggccgtccaggatcatctggtcgccggtgtaagcatgaacggtggtcatgatgccggaaacgatggggtaggtcttgttcagagtgttagccatcggagccaggcagttggtggtgcaggaagcagcggagatgacctgatcgtcagcggtcagggtcttctcgttgacggagtagacgatggtcttcaggtcattgccggcaggagcagagataacgaccttcttggcgccagcagcgatgtgagccatggacttctccttgctggtgtagaagccggtgcactccagaacgacatcgatgcccagctcgccccaggggcaatccttagcatctttgatggcgtagatcttgatctccttgccgtcgacgatgatggagtcgtcggtggaatcgacggtgtgcttgttctcgccgatcttgcccaggaaagagccctgagcggtatcatatttcagcagatgcgccagcatcttggggctggtcaggtcgttgatcgcgacgacctcgtagccctccgcctcgaacatctgacggaaagccagacggccgatgcggccgaaaccattgatagcaactttgacagccatagttaaatcctcccaagattttgtattaaggggatgcccccacctcacggtgtcatagcaccgcgctacggtacatcattattgtatcccattacgacgcaaactgcaagggggactgttattcttttaacgcaaaattttgaaaaaattgttccaaatcttcacttttgccgtcatgacgcggcttttgctccaaaatacaacaacgccgggcgggctgcggtgcggctaaccgggctttgactgcatacaataaaagaagcgcggcctggatcccgccgcaaaactccgccaagggagatgaagccatgtcaaacttttccgccctgcgtcaggctttggccgggcaagccgcccgccgcacggcgcggggcctgccgccgggcgcggtgctgccgcgtctgcgccttttgaccacagcggaacttttatgtcccgccgcgccccctgtctgtgccgccgacgcctgcgccgagctggaagccgtctgctcggcggcccggtgcatgctgcgccgccgggacggctggctgcgctttgcctgtgccggcaaggcgctgccggtactggtccggcccgcccttttgcaggcggcggtgctggcctggatgcggggcgccctgatggcgggcgccgacgaggtcagcctggtctgtgccgagcagggcggcgcggtacgggtttccctgtgcggcggggccgatccccacggcgacgccgccgccctgctggagcgtctggcccgggaggcgggcggcactgctctgtttcttgcaagaggtgcattcggtgcggcgctgcgcctgccccgggccgacggtctgcccctgcgcgagcccgcccgagccgaggacctgctggccgaccgctatgccctgccccgcctttatctggacggattctgcgccgagccggaactttgaccgcggcttgcttcccttttcgtgatatggtacgatggtaaaaagtcatcgtgttatttcgcggagctgccacaaaaaggcaccggtttccctgctccgcatcacggggaggggtttcatgctggaacatctgcgcagggcaacggcccgcaaaaagctgacgctggcaggcattctgctgctcatcgcggcgctcatcaccttccggtactgggcgggctttgccgcgctggtgcaggggccgcaggacctgtataccctggacgtggattccctggagggccgctatgtggccgcccgggtggacatcatctacgactggtacgccgagagcgtccgccgtggggacgagaccgagacacccgtccgccgggaatatatcatccccgtggggagtttttctttcatgggcatggacgttccctccgaccgttttgacgaggccgacgcggtgctggattccaccctggccgactaccagggctacggcggggacggttccgagcttaccgtgcgggggaccattcgtcagatggacgcccgcaccctggactactattatcaggtggtggggtacgacgacctttccgaggccgaccggcagcggtttctgccccttgtgctggtggcggacgaggtcgccgggtatccggtttcctccctgaccacgggcgctcttgccctggccgcttttgccctgcccagcctgcttctggtgctgagcgccctcttcggcaaaggcccccgtcagcccaccgcctatctggagtccctggccgcccgggcgcaggcgccctccctggaggaactggacgccttttacggccagaccatcccggccgattccctgcgcctggaccgccgctggctcctgtatgaaaacgccgccgcaagctggctgctgtccacccgggatgtggcctgggtctacgcccagccggtacggcgcaccatccccaacggtgcctgccacgtggtggtatgcagcaagtcggagccgggacggatggcccggcatctgatccccctgccctcccagcgggccgcccagaacgtgctgggccggttgtctgccatgctccccgacgccgtctttggctacgatccccggtgggagcccctctaccgcgccgatcccgagcggttctgccgggacatccgcggcgagcagcgggccgcgtccgccgcgccccgagcgccgctctacgacgcggtgcgggatgcccccgacatcttcccgcccagacccggtgcggagccccagccccttgaggacacggacgcccctgcggcggcagaacccgccgtggagcctgccgcaccggacagtccctccgccccggacgccgtccccgacgcaccggacgtcgacctgacagagcctgacaccgacaatgtgagcccggaggagccggaacagcccctgttctgatttccttttcaaaacagcaaaaaacacccccgccgcccgggattttccgggatggcgggggtgttcttttcttgttgcggggagaaactcagtcctcgatcacaatgcgggtgatgaccggcatcttgaccggcttgttccaggtctcggcgccgtaggtgggctgggaggcgatggcatccagcacctcaaagccgctctccatctcgccgaaggccgcataccggccgtccagcttgggggcgtctttgtgcaccacaaagaactgggtgccggccgtgtcaaaatcatcgtcacgggccatggacagggcgccacggatgtgtttgagggggttgggaacgccgttttcggcgaactcgcccttgatgtgccactcgctgtcggtcatgatgtcattgtccggcgaaccgccctgaatgacatagtccttgacgatgcggcaccagcaaagcccgtcgtaaaaaccgctgcgggctgtcttgacaaagttttccaccgtaatgggggcgtgttccgggtagagggtgaacaccatctgcccgaagccctcggtctcaatgatacagcgcatcaggacacgaccacgttcttgaagtagaggttggaggaagcggtcatgtagtagccgctgatgttgtcatgcatcaggaaggagttggacttgtagtacagcggcaggcagcagtagtcgttggaaaccaggtcggcggcctgcatggtcagctcagcagccttggcggaatcgctctcctgcatgacctgctccaccagagcgtcgtactcggggttggagtagaagctgttgttgctggaatcgccggtcttgaacaggggcaggaagctcatggggttcaggtagtcggcgctccagcccatggcagccacttcgtagttgccctgctgcacatcctcgtagaagatggcccagtcgttggaggagacctcaacgttgatgttcaggttgttcttgagcatctcggccatggcctcgacgattttcttgacggtgtcgtcctgatagtaggacagcttgagggtggggaagccttcgccgttggggtagccggcctcggccagagcagcctgggcggcctccacgtcagcggtggcggacaggccgtagtcgctgcggccctcggtgatgtccttgccgtccacgctgtagcccggagccaggaagctgtaagcgggggtgccgtcaacctgggcgacgttgtcgatcagggactgacggtcaacggccaggcagagtgccttgcggaccagggggttatcgtagggagcaacggagcagttgatgttgtagtaaacggtgccgtagctggggtagacctggacgccggctttctcggccttgaggcgggcgtagtcggaggacgggatgctgatgatgccgtcgacctcgccggactcataggcggtcagagcggtggagttgtccagaatgtaacggaaggtcagcttttccagggtgacgttctcggcatcccagtagttctcgttcttttccaggatgacgttctcgttcaggctcatgccggtgaccttgaaggggccgttgcagatgtaggtctcgggagagctggtccaggcgtcgccgttggcctcgatggtggcctgctgcacgggatcgtagacccacatgctcagcacgtcgatgaagtaggaggtgggctggatcagggtgatctccagggtctggtcgtccacagccttgacgcccagatcgtcggcggtcgcggtgccgtcatagaattcctgagcattcttgacgtagccggtgaccatgctgacgtactgcgccgcagtggagggcgtcagaacgcgctggatggagtaaacgaaatcctgtgcggtcagcggggtgccgtcgctccacttcagaccgtcgcgcaggtggaaggtgtagaccaggccgtcgtcgctgacgtcccagctctcggcgcagccgccgaccagcgtgccggtctcgtcgtaggtgacaaggccttcaaagcagttgatcaggacgtactgggcaaaggagttgttggtaacgccggggtccagaccgtcggggatgttgttcagaacaaaggtcatctcctgggcgccggcaggggcagcttcggtggttgccgcgctggagctgctgtcagtggaagccgacacatcggagatgttctgcggttcgctggagttgcacgcgctcagcagcgaaacggccaatgcacccgcaagcagggcgctcaaggctttctttttcatggtgatctctcctcttgtttattctgttatccgccaatgacgggataacccttgaaaagtgtaccggcctttgtcagccgtacaggtggcaggccacacagtggccgggggcggcctccttcatttcggggacctgctcggcgcagatgggcttggcgaaggggcagcgggtgtggaagcggcagccctggggcgggtgcaccgggctgggcaggtcaccggcaacaccggtgttctcccgggtgcaggcgaccttggggtcggccacggggatgcaggacaacaggcccttggtgtaggggtggaggggattcttatagatctcctccgcctcgcaggtctccaccagctggcccaggtacatgacgcccacgtcatccgagacgtagcgcaccatggacaggtcatgggcgatgaagaggtaggacaggccttcctcctgctggtagtcccgcagcaggttgaccacctgggcctggatggaaacgtccagcgccgagatgggctcgtcgcagatgaccagttccggtttgaggaccagcgcccgggcaatgcccacgcgctgccgctggccgccggagaactcgtgggcatagcgcccggcatgttcccgggtcaggcccacacgttccagcatggggtaaacgtactcgtccacgtccttcttgttcttgaccacatggtgggcgatgaggggctctgcgatgatatcccgcaccgtcatgcgggcgttgagggatgcgtaggggtcctggaagatcatctgcatcttgcggcggatgggctgcagctgacgggcagacagattggtgatgtcctggccgtccaggatgatcttgccggaggtggggtcataaatgcggatgatggtgcgggcgcagctgcttttgccgcagccggactcgcccaccaggccgaaggtacggcccttgcgcagggtaaagctcacatcgtccaccgcgtgaacgacactgtgcttgcccgccgggaaatgtttggtcaggtgttccacctgaaggatgggctgttccatcactttgcctccttttctgccgcggcaagcttgccgtacagcgggttgccctccgccggggcgtcaggctggagcagccagcacatggcccggtggccgcctgcctgaacatagggcgggcattcggcggcgcagatgttgcgggcgtaggggcaccgcggcgcaaagggacagcccttgggcgggttggtcatatccggcgggctgccgggaatggactgcagccgctcggccttgtccttgttgatgccggggatggaggccagcagacccagggtgtaggggtgcatggggttctcgaagatctcgtcgatgcccgcttcctccatgaccaggccgccgtacatgacgaccacgcggtcacacagttcggccaccacgcccaggtcatgggtgatgaagatgatgctggtctcgtactgcttctgcagggtgcgcagctgtttgaggatctggtcctggatggtcacgtccagggcggtggtaggctcgtccgcaatgagcaggtcggggtggttggccagggccatggcgatcatgacacgctggcgcataccgccggagaactcatggggataggccttgagccgtttttccggctcggggatgcgcacctgctcaaacagttccagggtgcgctttttcagttcctcgggcttgagctcggggtgatggatcttcatcatttcctccacctgcttgcccacggggatcagcgggttgagggaggacatggggtcctggaagatcatggcgatcttctggccgcggatggcgcgcatttctttttcgttgcacttggtcaggtcccggccctcaaactggatggagccttccttgatgcgggcggtgtcggccagcaggcgcaggatggtcatggaggtgacgctcttgccgctgccggactcaccgacgatgcccaggatctcgcctttatgtacgctgaagctgacgccgcgcacggcctggacctctccggaggaggtcatgaacgaggttttgaggccctcgaccttgagaatttcttccattgtccttgagcctccttactttttgagtttggggtccagcgcatcccgcagaccgtcacccacaaagttgaacgcgaacatgatggcgcagatcatcagtgcggggatgaacagctcgtgggggctggtgcgcaggttggcggaagcgtcgttgcacatggtgccaaggctggccaggggcggctgcaggccgatgcccaggtagccgaggaaggcttccataaagatggccgaggggatcagcatggtcagggtgaccaggatggagcccatggcgttggggatcagatgctggagcaggatggtcttgggggaggagccgatggtcttggcggcgagaacgaattcctgctgcttgaggctcagcacctggccgcggacgacgcgggccatgtccacccagtagacgctgcccaaagccacgatgatgctctggatgccgtcgcccatgacctgcatgatgaggatgacgtacagcgtcagggggatggtggagatgatgtccacgatacgcatcatgacggtatccaccatgccgcccacataaccggacacaccgccgtacaggatgccgatgatcatgttgaccagggcggccacaaaggccaccaccagggagatgcgggtgccgtacatcaggcgggtgaggatatcacggcccagggcgtcggtgcccagcaggtaggaggtgttccacaccatcttggtggagtagatgttgccggtggcttcatcggccaccacgtaggggctgccgccgtagtatagcgcaacttccttgccgtttgactcgaaaatggtcatggacttgtccgattcttcccggacacgggtcagctggctgcccaccttgccgtcctcactgacggtgatgagacgcagggactgggtgatgtacaaatattccccggaaggtcccacatagaccttcatgacggggggaatgttgaccatttccaggttctgcaccgcgtaatcgtacggggtgaacagggggcccagcaaagagaacaggatcagcaccgcaatgatggcaaatcccgcaatggccgtgggtttgtggcggaaccggaaccatacgtctcccgcaaaggtccggcttttggaccagatcttttcccggtccgcatcggacgccgccagcggcgcccatttgttctgttgtgtcagctctgccatggatgttttccctccccttttgtcaggactcaaacttgatgcgcggatcgatcatgcagtagaacacatcgaccagcagcaccatcgccatcagaaacgccgcgtaaaaaatcgtcacgcccatgatggtggtgtagtcgcgctgggatacactgttgacaaagtagtagcccaggccggggatggcgaagatcttttccacaacaaaactaccggtcagaaggcccgcgatggtggggccaagcaccgtgatgacggggatcagggcgttgcgcagggcgtggcgggtgaccacggcgaactcggtcaggcccttggcccgggcggtgcggatgtaatcctgtcccatgacttccagcaggctggaccgcatcaggcgggccaggtagctgatggaatagccgcccatggcgatgacgggcaggatgtagctctgccagctgtccaggccgtaggtgggcagccagttgagtttgtaggagaatgcgtagatcaaaagggacgcaatgacaaaggacgggatggtgacgccgatggtggcgaccgccatgagcagcatgtcctgccatttgccgtttttcagcgccgccaggatgcccatggggatggcggcgatgagcacaaagatgacggtgacgccgcccagccgggccgacaccggcgcgcccgaggcaatgaactcattgaccgtctggccggtgtacttgtaggacgggccgaaatcgccgtgaaggatgccgcccaggtaggagaagaactggacgtagtagggctggtccagtccgaactttgcctccatggcggcgatgacttcttccgggacgcctttggtgttggtgaacggtccgcccgggaccgcgtgcatgatgacaaaggtaaacaggatgatcatgaacatggcgatcagcatcatgccaaggcgcttcaaaataaacttgaccataagaaacaggttccccctcctcttttctggatacggcgcgcgccgggaagctgtgtctgtatgcttccccgccgtggtccggcgccgcataccgcccgccgcaccggataagaaaaggcgcaacagtgaatgggtacacccttgcgcttgcgtgtattatactacgcgaaaagacagttgtcactaaattcgatacactttcgtgaacaaaactaccttttgcccaatttttcaatattttattttaattttttatgaacttataccctatttttagaggtttttcctgttttttagatgcacatttgtatttgcaaaaaacacacgtctccttgcggaaggtcaaagcgcagggctgctccgcatttttatatgtatattttttcatttataccggttatcttttatattttacgcatctttatccatatgtttttgtatggcgcacattctttttgattttgcgcattaaagcgtcaaaaagcgcccaaacggaggaaaaattcccggtttgggcgcttttttcgcaaatcgtgtgtttccccggcagacagttcaccggaatacaggctcagtgaacggccgccgtttcgtcggtccggttgatgagcaggtggtcccccggctgcaacaccgtgctgccgtcggggatgaaacaatcgtgtccccggcggatcagaacgatcagcgagccggggcggtcgggcaggtcggccagggtggcgccgccggtcagttcgtccgcctccaccacgcgttccgtcagacagaagtcggtcccgccgtggcgttccagggcgcacatgaccagcaggtcccccgcctgcaggcaggtatctcccttggggaccatccgggtgtctccccggcgcaggctgaccagaatggtgcccgggggcagttccagcccggccaccttgcggccgcaccagggatggccctcctccacttccagctggacaaagttgacgggggtctcatccacatagtcggtgaaggtcttgagaacgttgccgccctcgtcgatcatgtccagcctgcgggccacagcgggcagcagcgacccctgcagggcgatggagaacagcaccaccacaaaggcgatgtgaaaggggtcgttttccatggcggcagggctttgcaccgccacaatggcaaacacgatggacgccgccccgcgcaggccggagaaggacaccagcagccgccgggacacgctgccgccaaagggggtcatgagggcaaagaccgccgccggccgcgccacaaaggcaaggaaaacggcaatggccagccccggcagcagcaccgacgccatgcgggacgggtaggacagcagccccagcaggaagaacagcatcgcctgcatattgccggtcacgccgtcaaaaaaaggcaccagcgtcgtgcgggcggccaggttgctgttgcccagcacgatgcccgcgatataaacgctcaaaaatccgttgccgcccagcatggtgggtgcggcataggccagcagcgcagtccccaccatgaacagcgtctccatgccggaggtatccagccggaagcgccgcatgagccagcggacgccgaacccgatgccaaagccaaaggccagccccaggaccacctgccccgccagcatctgcaccacgccgcccaccgtgacgccggtctccatggcggaaagcagcaccaccgtcagcatataggcaaaggggtcgttggaaccactctccacctccagcaggggcgcggtgttctctttgagggccaggcggcgggaacgcaggatggaaaagaccgacgccgcgtcggtggagcccagcaccgcaccgcagagcaggccttccaggatcggcatccccagcacaaaatgacagaacagcccggtgagcagggcggtgagcacggttcctgcgctggacagcaccaccgacacggcggccaccggccgggcggctttccagttggtgccgaaaccgccgtaaaacatgatgaacaccagcgccaccgagctgatctgttcggcaaaggcatagtcgtcaaaagggatcttgaacaggccgtcggaaccgaacagcatgcccagcagaataaacatgagcagcgacgggatgcccagccggcccgacacttttttcagcagcgaacaggccagcagcaccaccgatacaagcaaaagcatggatgtcagtgcagatctctcctttcccgtggcatacaaaacagggcatgccccgtccccggcgtttccgggcggcaggccatgccttgcattatgccgtgtgataacagtataaggatattataccagatatgaccgcacggctgcatcaatgttttgtaaactttccggtgtcggatgccgtattttttcgccgtttggggacggaggccgtcagggcgtggctttcagcgatgaggcgggctagttcctcgtcggggatggtcccgtccagaatcacgctgaaccagtgctccttgttcatgtggtaggctggcaccgccgccgtgtaggtcccctgccagaagcgcacccactccggccgggctttgaggttgatccagatgcgcccttcccgctcaaagatcagggcaaaggtctttttgttggatctgtgccgcatcaccgtccagttggggtcgtggaagggataatcctcaaacacatcgggcagggcgctgcaggcggcaacggcttcggcgcgggtcagcatggcgcggggcctcctttcgggcgttttgtactttcagtatagcacaaaaccgtcaggagtcggaacggatctcggtcagaacgatctccccgttcaacagggcctgccggtccaggcggcagagctgggcatcgtaccgggtagtgcgctcaatgctcacccccgtgtagttgatcccctcccggctgcgcagatacccgtcggtgagggcccactgcccgcccgcgctgccggtgtaatattcaggggaaagatcctccccggaagcgttcacccccgccgggcggatgatggtctcctcccccgtggccaggtccaccgcccagaaatccccgccccaggacagcaccatccggctgccgtcggtgtcgatgggctcaatgatatgttcccgggcctcctcggtcagggtgcagacagattccggctcccccgtcccgtccagaggtttgacagagacggtcccggtacgggcatctgccatccagacctgatccccctgcaggaggatgcgggtccggtcgctttcgtattccactactttctccggacgggccgaaagctccagcgccgcccgccagagggttgcctgtccggcttcgttgtcccaggtctcatagtaaaagacgttgtcccgcaccatctgaggccactggaacacttcgtcggcggagaacacctccgtccactgtcccggctgctgccagaccatcagcgagaaggccccgccctcccgggtcgcaaccgcccagatgccggcctcgtttttccccaccagaagggaaccgtcctccccggcggcggggcattgggccgccagcgtcttttcactgccgtccggagccacctgccaaaccgcattgctgccgtcctccatgggctgggcaatgagcaggctgccgtttgcctccgtcccgaacagactgcccgcccccacccaggcggagcaatcctccgagtcgtgggtgcagccttcccgggtgcagagcagagtctcccggcagctgtcccagtcaatgtagtagatgcgtttctgatccaggcggctcttgttatagatctcgcccacgtttttgacctcgtagacgccggccggggtagccgcgcactgaccccgcagccggaattcctccggcaccgcccgggcagcaggttttgcggaacagcccgccgccccggcagtcagcgccgccgccagcagggcggcacacagtttttgcagcttcatccggtcaagcctcctcatatgccattgccgcggcctgaatgttgtcccggtagtcgatgagcatttccgtcaggtcgtcggcctcctgccgggaaaggctgtacacccgccaggctgcccggccttcctcccggtagagatacaggcagagttcccgggcgggagaatacaccgtgcaggcgtcgttcagttcgggcagctgctgccagtccccagcgtcctgctggcccagaaaggccgtccaggcatccagcgtgccgcccggctccccgtcgggcagagcgcccggggtgtcgctgtacacgtcaaattccaggggcagctgcagctccggctgccagatcatctccacaaactgcccgctgcccgcccaggaatactttctcgtgccgtcggggcggcgctgcgccccggcttccagggcttccccggccaggatctcctccgccgcccgggtgacttcgtcatcggccacccccgccgtgtgcagggcgtccagaacgtcggcaagcacctcccggacctcctccggggcaacgtccaggggttcgccctctccctggtcgccgtaaagcacccggctgcggtagagtgcatcggccagagggtccccggcaatggtgtccggttcctcgttggccaggacggggcgttccagggcggtgttttccagcgtccgcccctcccccatgcaaagaagcgcaggcagtgccagacacagcgccgccccggccagcaggcccagcacggccgccgggctgcgcagccgctttagagcggacatcggctcagtcggtttctttttcatggggttcctcctttcccggcaggggcagggcgggcaggcagaagctcacccgggtgccctcccccactgtgctggcaaattccaggcgggtgccgtgggcttcggcaatggcacggcagagcgccagcccgatgccgctgccgttctgggcccgggaccgggacttgtccaccatgtaaaaaggttcggtcaggcggggcagttcctccgccgggatgccccggccggtgtcccgcaccgcaaagcagatcttcccctccgccgccgtgacctccagatggacgacgccgtctttcggttccgcccgctcggcgttgctgatcaggttgcgcagcagggcacagagcaggtcggcgtccccgcggaccgcggcaggcgtttcgagggacgtcacctccaggggcaggccgtcccgggggcaggcccggcgcagagcggtgagcagttcctccaccggcacggcggtgagcgtaatgccctcctgttccacctccatcaggcgcagcagcttgcggctgagggcctcgatgcggcgggcttcgtgggcgatgtaggccgcggatttctcacgcacttccaggtcatcccccgccgtgcgcatcatctgggcatagcccagaatgctggtcatgggggttttcagctcgtgggtcagggcggagatgaagtcctcccgctgccgcaccgccagggcgcggcggcccagttcctcctccaaggcagcggtcatatcgtcaaagctgcggctgagggcggcgatttcgtcgctgccccggatgccggtacgccggtcgtaggctcctgccgcgatctcccggcctgcctgttccagggtatgcagcggccggatcaggcgggagatcatccaccacaccgccccgcccgccgccgcaaaggccagcagttcgatccagaaataactggtcagcaggctttgctgggtctggtaggcggcgtccatggagtaggcccccacgtaaaagacggtggagccgtcggcggcggggacctggtcggcaatgagataccagtggccgtcctgtccgctgcgcagcacaccgcgggagggatcggccagaagctcctgctgccaggccagggggacatcctccggcatggaggagtaggccagcaccccgtccccggtaaagagggcgaactgtttttcctcccccacatagcgggagacggatgccccgtactccatcagggcgttggtgatgccgtccgcggcggcgcgcaggtccagctgcagcgcgtacagttcccgctgctggccggtttcggcctgatattgcaggtcggacagcgtccggtaaaagttctgccggatgagcagccagccgcccagggacagcaccagtcccagcaccggcagcaccgccagcagcagtttttgtgaaagtttcatcccgcaccctccagcagataccccagccgataaacggtcttaatgtgcttgctccaccccagctttttgcgcaggcgctggatgttcagatccagcacccgggtgtcggtctcgctctccccgccccagacccgctcgtaaatgacgtcccggtgcagtacgatgccccggttgcggatgaggaacaccagcaggtcgaactcccggggcgccagggccaccggtctgccgttctgcagcaccgtgcgggagaccggctccacctgcacgtcaaaggccgtcagcacatgggcgccccggccggtgcggcgcagcacgctttccacccgggccagcagttcctccggttcaaaaggcttgacgatatagtcgtccgcccccagccgcagaccccgtacccggtcggtcagcgcccccttggcggtgaggaagatgaccggcgtgccgctgtcggtgagctgcggcatgagggaaaagccgtccaccccggggagcatgacgtccagcagcaccaggtcataggttttttcgtccagcatgcgggaggcggtcatgccgtccgccgcgcactccacctcccggttgagcgggcgcaggatcaggcagatcagttcccggatgggctgttcatcatccactacaaggatcggattcacggtaggcttcctcccgtcgttgttcttgtctttatctaaccgtgcaaatgtttcaatggtgtatcagggcaaaacgcaaaaagcccgccggagaggaaaagacctctccggcgggttcatcgcctgccgcccggaatccgtgtccgccgcaaacagaacacggatcattgcagtttttcgatcccgggcagggatctgtcggagcagtgatatccaatgatttctgttccgattatagcacaaccgccggcatgcgtcagcccaaacgggctgcttccccgtccggcgtatcaggataaagctgatacttctgccacagcggcagccactgctgcgtgtgctcccggatgaccgcgcagacctcctgcgcatcaatgcccggacgacgcagcaggtcgctgccaaacagaagatccgccgtatagtccccctgttcgtggcgcggggcggtaaaggcaaactcctccccgccctgatcccgggccgtcaaaagcattttcacgcccagttccaccggacggacacggcgggggtcggtcacgtggacctgcacgccccggcacagcttgcccgcgtgcttgccgaacatggggacaaaccccgccgggcggaagcggacgccgggacaatcctgttcctccagcgcggcagcaaagcgcacggcgttcagccacggcgcgccgatcagttcaaagggtcgggtggtaccccgcccttccgacagggtggtgccctcaaacaggcaggtgccgttgtacaaaagcgcagcatccggcccggcaatgttggggctggggttgatccagggcagaccggtgtccgcccagtacatggaccgcgtccagtttttcaggggcacgacctccagccgggcgccgatgccgaattcccggttgatcaggcacgccagttcgccgcaggtcagggaaaaccgctggggaatgtcatacatgccgataaaagaccggcagtcatcccgcatatgggtgccttccggagacagcccgccgatgaggttgggacggtccagcaccacaaaggggatgcccaggcgggcacagacggtcatgcagttggtcatggtatacagataggtgtagtaccgggaccccacgtcctgaatgtcatacaccatcatgtcgatgccggccagatcctcggggtcggggctccgctttttgccgtatatgctgtataccgtgacgccggtctcctcatccacgtaggtgtcgatgtcctggccgtcctgacggtcgccgcggaccccgtgttccggggaatacatggccgtcagggtatattcccgggccagtttgtccgccgtcgcccggaaatcccactgcaccccggaaggattggtcaccagccccagccgcttgcccgcgaaaagggaccggtactcatcgatccggtcggcaccgcacagaattttgctttccatagggcgtcaccctcaaaaatccgtcagtgcggcacagctgaccttgtcaaagccttcccgcaccatgaacgcctgggcgcgctcatagccgctctcgcacccccggcagatgctcagggcatcgtaatagtccagataccggtggtcggtgctgtgggtcacaaaccagtgccgcacgatctcgcggcgccacagctcatatcccttgctgacgtcaacatacagatagggtttgaaatccttggcgtcctccaggttttccgcaaagaacagcttggaacagggatgggcgggcagcggacgctcaaagcccgcgttggcggcatagtaccgggcatgggatacgatgcggctggcggcggcgtggtccttgtgcacgctttcccgccagtgggtgatgatggcatccgggcggacgctgcggatggtatcgcagacctgccagatggttttctcgtcgtaggtcagcattccgtccggggtgtcgaacaccagggcctcgccccccagagccttggcaaattcctgggcttcccgcactttctggcagcggtattccgccggggtcatgccgggagggttgcctttttcgccggcggtcagtgccaccgtcacgatccggtccccctgcagcgcatgggaggccagcacagccccgcaggtcagttccatatcgcccacatgggcgccgatggccagaatcgtcgccattgttcacaactccttttccataacagcaaatcgctttgccacttcaaatccaacggaacggtagaggttcaaagcagggttttcctcgtcggtgaacagggtgctgtacccggcgccgatcttgcggaactcctccatcaggcgctggaacagcaccttggcaatgccccggccctgatacccgggatgggtggcaatgccgttgaaccagccgcggccgttgggttccttgtcgatggggccggcaaagccgacgatcctgcccccgtccgccgcgatcagcaccgggaggggattttccagagcggcattgacccgcatggtctcccgccatacctcaccgtgaagggcgtcgaacaattcttcaaagccggtgtgccgggcagcatcgtaaaatccgatctcaatgccctgcgcctcaagtttttccagccggcggcggcagtccgcggacatgacgaattccgccaggggcaggtacatgccgtcctccacccgcagctgccggtagccccgcttggacaaaaagcggaaggcatcactgtccaccgccacgcccggggcgttattgtggaacacgccgggacagccggggacctgccaggtcaggatgaccggattgcggtaagtcaccgccatgtggtgcttgccgacagcagcgaaccgtttttccagagcgtccaaaagggcggaggccacacctttgcccctgtgggcggggtcggtcatcagcatggtcagataggcgggggtgttgtcaaaatcctcgccctgaagataatgccgcttgaccagcgcggaggcaaagcccagcagggtcccgtcctcgtcccgggcggcaagggtgtattcctcggtataatgggggttgtcaaaaaagatcgactcaaaggattccggggtcagcggagcataggggacgtcccccgcctcgacgcaccggttccagagttttgcggcagataccgcatccccccgtttcaaaacagtgatgttcattgttgttccctccgttgatgccagagccagaacgcgccccgttccaccgggccgtcattccgggtaaagcttgctccgggatacatcgccgcccaggctgtgcaaaatgcctccctgaccgggacacagtttttcagcacgctgcccgacagcaccgtgagcggttcctgcaggcccaggcggctgcctgccgcagcggccatgcgggccaggcggatgcccgctccgcgcaggtcctcctccgcgccggcatcgccccggcgggccgcctccatgaccagcggcgccagggcagcgatctctcctttcgtcaggccgcgcagcgccgccgggagctgccataccgtctcgcagttcagctgtttcaggacctgtccgtccagctcagtcaggggcagtcccctgtcccagcgctcggtcatgcggcggcaggcttccagagcaatgtcggttccgctgccgcggtcgtccagggtcattccccagccgccgctgctggcacatcggtcaccccggcgggcataggccaccgagccggttcccgcaatgaccagcacgccgtcgcggtcccgcagtccggcatggagcgccatcaggccgtcgtccatgacctgggcaggacacccgcagcgggattccagcagacgggcggtgggttccgccaggccggaggcccgcatccccgccgcgcccacggcggcaaacacgcacacgccgtccggaacggccttgcggcaggcatccaccgcgcggagcagttccctggccgcggcgtcgggagcctcagaaaaattgcccggacccgcagtggtggtgaacagcgggctgccgtcctgcgccgagaacaccgtggccgccgtcttggtggccccggcatccacgcctatcacgtattgcatcatccgcagttttcctccacatagtccagcgcacgccggaccacgccgccgcactgtgccagccggcgccgggcagaacccgtgtccgtcctggtacacagctgcacgatggcggtcttgacctcgccgtcacactggcgcagcgtctgttctgccgtctcgtcgtccaccgacgcggcctgagccacgatgcggcgggcacggtccgccagtttggcgttgctgacctgaaggtccaccatcaggttgccatacacctttcccagacggatcatcacgccggtggagatcatgttcaataccagtttctgcgccgtacccgatttcatgcgggtggagcctgtaatgacttccggtcccaccaccggggtgatgcagatatcggccacctgggccatgggcatatcgtcgttgcagcagatgccgatggtcagcgccccaaggttccgcgcataggcaaggccgcccaaaacaaagggcgtggtcccgcttgcggcgatgcccaccaggacgtcaccctttccaaagccgcgacgggccagttcctcgccgcaggcccgggtgtcgtcctcggcgttttccaccgcatgaaaaacggcatcctttccgcccgcgatcagcgcctgcaccatgctgggcggcacattataggtaggctgacattccgacgcatccagaatgcccatccgtcccgaagtgcccgccccgcagtagaacagccgtccgcccgcgcgcagccgctcatagacggcgtccacgcttctggcgatctgggggatctgggtctcgaccgcaagcgctacttttttatcctcccggttgattgccttcatcatttccagcgtcgaaagggtatcaatgtaccgggtatccgggttccggctttcggtcttacgattttcctgtttcatggccgctcgttcctccgctcaggcttccacctcaaacaaggcttcggtttcaacggggatatccccgggcagtacattaacgccgatggccgaccgtgccggaaggccctgggtgccgtacagctcggccagaagggcgcttccgccgttggccacctggggctgctgggtaaagtcggacgcactggccacaaaggtcaggatcttgaccgcgccccgcactttgttcaggtcgccgatctcctgctgcagcactgccagcacattgagcatacagtctctggcggcgtcctggccctgttccagcgtcacgccgtcgcccagcttgccgtggacacagcttccgttgatggccgggccgcagccggaaatgtaatacaggttgcccccgaatttcttgcacggggtatacagtccgcccttttccgggggcggaggcagcgtcaggccaagttcacgcagcttttcatagacatccattttttccacactcttttctgacgtttttggttcgtcacagcccggcccgcatcacatgggcgggacgctgctgtgttcgtttttcattcagccagaccgtttgtccggcgatcatgacccgctgaagtccttttgccgtccgcttgggatgcaaaaagtcggcgcagtcgcacaccgtgtcggggtccaggatattcaggtcggcacgtttgccgggcagcagctcgccccggtcggtcatgccgaaccggcgggcggtcagtcccgtcattttgtacaccgcttcttccagggtcagcaccccgcgctcccggaccatatcccgtagcacgcggggaaatgcgccgtacagtctggggtgcgggaagtccggcgcgccgtacagggcgtcggatatgacgccggcatagggcagttttgccacaaggtccacatccgccgggtccatgctcatcacgatgatgcccaccttgccctgctcctcgcagagaaggcggaccatgaaggcggtctcgtcctcgtcccctgccagttcgcaggcccggggaatggacaggccctggaaccgccggttttcttcccgctggaccgagctgatgagcacccgctcccagccgatggaaaagaccatgttatcccagcccggctggtcccgtcgcagttcccggcgcagggtatccaccccctccggggtggacagccagtccagcgtctgccgggtgctcccccgcaggcagacgggcgggatcagtgtcatcagggtggtggctccgccggtataggggtaaaaatccacggtaatgtcctgtccggcgctgcgggcgcgctcgattttttcgatcacccggggcagtgtacggccccagttctgtctgccgaacaccttgaaatggctgatgttcagcggcagtcccgcctccgccgtaatacggatgacctcatccaccgcgtcgggaaggcggtcgccttccgagcgcatgtggcagcacagaggcctgccgtagcgggctgtgggacgcaggagccgcacatactcctccatggtggaatagcattccggctgatacatgatgccgcaggtcatgccaaaggcgccggcttccagcgcccggcacaaataggcctgggcaagctccatttccccgtcggtccacggggtctcggcaaatccttttacggcgcatttcacgctgccgatgcccaccagagcgccggtctccagcgctgcgccgtgctcttccagcgcccgcaggtaggagtcgaaatccgaaaattcctgttccgcaggcggtttgcccagacagggttcaatgtagggataccattctctcctgctgagttccgtcgccggggccgcggacatgccgcagtttcccaccagcatggtggtgatgccctggctcagttccgcctccccgaaatcggggtcggtcagcgccgcaaagtcggcgtgacggtggctgtcgataaatccgggcgtgaccagtttgccggatgcgtccaacacttcggcggatacgccgtccagactgcccgccggttccacagccgcgatgcggccgtcctccagcagcaggtcggccgggcgcaccggcgcgccggtgccgtcacagatccttccgtttttgacaagagtccgcacagggacgcctccttttttcaaaccagcataccgcgggcatccacgcggagttttcgcagtgtcccggcgtcgtactcatacacggcattttgcagattgaccgccgtgcagatatggatcggcgtcaggcggacgatctgccccacccgcagcccggtgctgccgccggcagcttccacgatgccgtgctcctcgttcatccggcacagccgcaggtccggcctgccgtccaccagggcatacccgggatagaaataaggttcggtgttcaccggagtatccatggggaaggtcttggtcccgccgtccagcaccgcgtagtcggggcggggcgtgctgaccaccgtggcgtaatagtggactgcgatctcctccggcctggcccagccttcgcagcagagcatgtggtcgttaaagatgtaggtccccggccggatctcggtcacaaggccggtgttggccacattttctccggtgggcgtgctgccggcgctgatgtcccgcagcttaatgccgacctcacgcaggcgggcggcagtctgcgccatcagggcgccttcctcccggcccgccgcttcccggtcgccggtgggcttccggtccaggatcaggcccttgaaggtataaatgcccgtcaggtccagaccgggcagccccgcgatgtaggaggccagctcaaccgcctgttccagcggtgcgccggtgcgccgggcgccggtgtccacttccatgcggacttccacggtcagccccgccgccgtcgcggcgtccgaaagcatccgggcggtatcgacactgtccaccgccaggatcaggcggcggcaccggcgtgccagcgccatggcccggcgcagacggaactcccccaccaggggataggcgataaaaatatcgtcgatgccgccgtcggccatgacctccgcttccgagacctttgcgcaggtgatgccgcaggccccgtattccagctgcagcttggcataggaacacattttatgggtcttgcagtggggccgcagcgccacccccgcacggtcggcgatcttctgcatcttttccagatttctgcggacgatctctttctcaatcacaaggcagggtgtttccagctgcgccagtacttcaggtcccagcattgcagttccctcctcaggctttcaggcccgccgtggcgatgccttccacaaaatttcgttggaaaataaagaacagaatggcgaccggcagaacaaagatcaccgcggcggccatcagcatggtccagtccaccgtaaactcgttgaggaactgctgcaggcccaaagacagggtcatgcgttcctttttattaatgtagatcaggggtcccaggtagtccgaccacgcattgaggaaggtatagatgcccacagtggtcagtgccggacggcagagcggcagcgcaatgtgcagataccgctggaactcgttggcaccgtcgatcttggccgcctcaaacagggatacgggcaggcctttcataaactgacgcatgataatgatgtagaaggcatgtcccgcaaagtgcggcgcgatcagcgggatgtaggtcccggtgagtcccagtgcgtgccaggtccggtaaagcgggatcatggtgacggtataggggatcatcatggtggccatgagcaggccggagatcaggttggcgcctttccagcggatcagtgccagagagtaggcgaccatggggaccacgagcatctcacccaacaggctgaacagcgtgatgatggtggtattggccatgtactggaaataggggatctttgccatggccgcgccgtagttttcgatggtgaattctctgggcaggacgcggaccggtaccataaaggcatcttccatcgtcttgaacgaagtcgtgagcatgacgacgaagggcgaaagatatacgatgctcagcgcgatcacgatcaccgcaaacgccaccttgaaggccttgcgccggacccggttgagccgatccattttcagactgtgcataggttcactcccctcccgcattgctcactgctttgttggacaggcggaccatcacgatggtaagcaggcccacgatgaccagcaaaatccacgccatggcggacgccttgcccattttctggtagataaaggcattgtggaacagatacagcggatacatcaggatggagttttccggaccgccggaagcgcccgaggtgtttccgcccgacgccgtggtgatgacgtacacctgcgtaaaatactggaaggcgttgatcaggttcaaaatagcctgatacaccagaacgtgtgccacacagggcagtgtgatgaagaaaaagcgctgtaccgcattggcgccgtccagctccgcggattcatagtaactgcgggggacgtcctgcaaagcagccaggcacaccaacatggtggtgccggtacaccaggcgcccatcatgaccagggcccatttggtggtatcgggattgatcagccatgccgggccatcgaccccgaatattttaaggaagttgttgatgaagccgtaggtggggtcaaacatccagatccagaccatcgtggcagccaccatggggatgaccgacggcaggaagaagaaagtacgcaccatgccgctgcccttaaaccgtttgttgacgatgaccgccagcaaaagcgctaccacaaggttgatcggcgttgccacaaacgcgtaaaagcaggtgttgaacaggcttgtgtaaaaccgctgatccttgaacagactgatgtagttttccaggccgacccatttgggatcgaccacggggttgaattccgtaaaactgtaatacagtgacatgatcagcggataaatgctgaagcagcagaaaccgatgatccagggcagcgcaaacaaaaagccgttccgattctgccgcatgctggccggtgacatcctgcgcttgccctgcaagctcttttgcctggacataagaccgggcgctcctttctttttcaaaagcggtgcgctcccgtaatcataggagcgcaccatacggatcaatgcaaaatcaactcaactgttcggcctgctgctgcagttcgtccatggcttcctgcggcgttttgctgccgttgtatacgtagtccagatactcgtcgatcagggaagtatactgtgcggaatccgccatcttgggggatgcaacgccgttaccggtcttgagggcttccatgaaggaggggaacgcctcgttgctggccatcaggtcgggatcgtcatacagggtgttgttggcaggcagggagccgatctccagcaggaagtccttcaggccttccgtggcgaaccagctggcaaaggcataggcgccttccttttccttggcgaccacggggatcgccagggaggtgttttcgtaacggctgacgccgcgcagttcggggtgtgcttcggtgccgggaaccatggtgacgccgaaattcacatcggggttgttgtcgcggatctggttggccagccagggaccgtcaaagcggaacagctgcttgccggcaaagaagatgtcctgcggggtgtagcggttggtattgccggtggccacgaatttctggaccttgtcaacgccgtacagctcacggtatttcatgttcatggtcaggctgtccagaacgccctggctgtttgcggtgggggtcatgctggtctcgccgtcgacccaggtgccgccgaaggcgtagatcagttcctgacgggcggaagccagggggaacagcggatagccgagcacatcgatgttgccctcggcgtccagcgtggtggcgcgcaccgccatgtcgtacagttcttccatggtctcgggaggctcggtctcaccgatgctggccaggatgtccttgttgtagaacatctggatgatgaccgtggtgatgggcaggccgtacatctggccgtccacgctgttgttttccaccgcgggtgcatcgtaaatgctgaaatcgaagccgttggcctcgcccatggcggtcatgttctccagcaggccgctgctctggtagctgatgacctcggcattggacagctcaatcacgtcgggggactcgtcactggacatagcaacgaggtatttctgcttgtcgggaacgctgaagccttccacaacatattttgactgggaggcgttgaagcgctcgatgacgcgctccatcatggcgccttcgtcgcccttgtggtaataccagtaagtaacggtgatgggttcgccggattcctccccggatgccgaggtctccgacgttccgccgctctgggaagctttgggtgcacagccggcaaacatgctcagcgccatgatagatgccatcccaaggctcagaagcttccatttctttttcatacgttgtctccttctttcttttttggttttatgattttggcagatcgccttacggacaaattgacattttgaacagtttcctgttattttgtttgctctttgtataaagaatacccgttccggagaggtttgtcaatattttttgaaaattattttgcaaatattttatttgttttgaaattatgctacaattttgggcataaaaaatgcacagccgggcaagctgtgcattcttgttttagcctctgtgccgcaccgccaaagcatccagggtgcggtcaagatagatctttacctcgtcatactgtgcgcttgccaccgccgagaacagaatgtccacaatgttcagcatggcaatgcgcgaacccatggcgccgctgcggaaggtgacttccggggtggagatgtgcagcacgatgtccgcccccgttgccagttcactgcggctgtaacgggtgatggcaatgctggtggcgccgcgcagccgcaccagttccagtgcgtccaggatctcaacggtggtgccggaattggataccagcaccgccacatccccttcatccagcaaggctgccgccgtctggatggaatgcccgtccacaaacgcctggcatcttttgcggatgcgcatgaatttctgctgggcatcctggcacaccaggcccgacgctcccacgccgtaccagtcaatgcgcggggcacggatgagggcagagactgccgccgccacctgctcctgattcaggaccgacagggtatcctcaatggagcggcggttgttgtaggagacattttcaatgatggtctgcagtttgtcaccggggcggatatcggtgtagcgcttttcctccccgtgatcccctgcactgcccatggccgccgacaggctgagcgtaaaatcccggtagccccggtagcccagcgttttacagaaccgcagcaccgacgcctcactggtaccgcactgcctggcaagctgtttgatcgaaagcagcggcacatcccgcaggtgggtttcgacataggcagccacggtctgctcggtgcgggtcatcgccggctttgcatcccgcaagcgaatctccacctgattagcacgctccatatctccgcctcctttggttttttcaggtcgttgcgtcgtacatttttcctgtataaacgacgtcatttcctgctatttccagattaagaatatcgcatttgggcggaaacgtcaattcatggactaaacttatcttttctctgcattggcgcacatcccatacaaagcgggggaatcaccgttttcctccccttcccggcacccgggacaaaaagcaaaaagccgcctgcaagcagaatcgctgcagacggctttgccgttatttccagaaacgcttacgccttcatccactgggcggcagaggcggccagcttgtcgttgatggcgtcggcttcggcctcgctggcgcccacggcggacaggtagaccttgatcttgggctcggtgccggaggggcgcaccatcagcttggcgccgttttccatgcggtactccagcacgtcagccttgggcaggccggtgtcgtcgttttcatagtccacgacccggtccacgccatagcccgcgatctcggcgggcgcgttggcgcgcaggcttgccatgatgccctgcatggtgttcatgccgctctcgccctcaaaggtgaagctgtgcagggcgttgcggtagaagccgaattcggcatacagggcgttgacggcatccagcaggctcataccctgcttggcgtagtaggccgccgcctcgcaggccagcatgacggcgttgacggcatccttatcccgcacatgtgcgccggacagatagccgtagctctcctcaaaaccgaagatgtagcgctcggcatggccctcggcctccagcaggccgatctgctcaccgatgaacttgaagccggtcagggtgcggcgcagctccacaccgtacttggcggcaatgggggtcgccatgtcggtggagacgatggtggtgacggccacggggtccttgggcatggtgccgttggccaggcggacgcggcagatgtagtcaaacagcagcacgcccatctcgttgccggagatcaggcggtagccgcccttgccgtccggcacggcggcgcccatgcggtcgcagtcggggtcggtgccgatcatcaggtcggggtggacggtgtcgcacagtttcaggcccgtctccatggcttcccggatctcggggttgggataggggcaggtggggaaattgccgtcgggcttttcctgctcgggcactacggtgacattggtcacgcccatgcgctccagcaacatttttaccggttccaggccggagccgttaagaggcgtatagaccagcttgagggcgctgacgtcgttgccggggcgcagggccagcaccgcgtccacaaagtcggacaggcacttgtcgtcgatggcggcaatgcggccgtcggccacagcctcgtcgtagtcggccaggcgggggctgtcaaagtagtcatgcttgccgatggcatccagcactttggcggcggcttccagggtgatctggcagccgtcggcgccgtagaccttgtagccgttgtacttggccgggttgtggctggcggtcacgcagatgcccgcaccgcagcccaggtaccgagtggcccaggacagggcgggggtgggctccagccggggatagacgcaggcggtaatgccgttggcggccagcacgcgggcagcctcccggcagaacagctcgcccttgatgcggctgtcgtgggcgatggccacctttttgggcaggccctcggcgttgatgtagtcggccaggccctgggtggcccgacggatggtgtagatgttcatgcggtttgtgcccgcgccgatgacgccgcgcaggccgccggtgccgaactccagatcccggtaaaaacggtcggtgacggcgtcggcatcgttgcggacgctgtccagctcggcgacgaggtcggggtcatccaccgcacggctgagccagagatcaagggtctgctgatattgcataaaaggagtctcctttcttcgcggttccatacaaaagcgaaagccccagaaccccgcccgcaaagcatggtttttgcgttgctgcgcagttctttccggcgtttcgttttcctatggtatccgcgcgttccgttcctgtatcctgttttgggggccggggagccgttctggcccccgtggccggtattgtattcagagtaccacatcccgggcaatgttacaagccgcccggcagcccgcaggccgtctgtactgcgcttttttgatgccgatggtcctccgccctacggtttgacgcaaaaaaggctccgcatccggggtgcggatacggagccttataagatgctgtcagtttttgacaaagtccgccacagtggcagcgatatgctctgcggtcaggccgaagtccgccaggacttcccaagcgggagccgaatggccgaactgatcgttgacgccgatgcggcgcacggggaccggcatcttctcgctcaccagagagcagacagcctcgcccaggccgccgatgacgctgtgttcctccaccgtcacgatgcgcttgcagtcgtgggcggcacgcaggatgatgtcctcgtccaggggcttgatggtgggcatattgatgacgcggacgccgatgatgccctgatttttcaggatggtggcagccttgagggcttccccgaccatcaggccgttggcgatgaccgcaacgtcaaagccgtcggtcagctgctcgcccttgccgatctcaaagctgtaattcagctcgtcatggatgacaggcacagccagacggcccagacgcaggtaaacggggccgttgtgacggtaggcagccttgacggcggcgcgggcttccacgtcgtcggcggggcagatgaccgtcatgccggggatagagcgcatgagcgcgaaatcctcgcagcactggtgggatgcgccgtcctcgcccaccgaaagaccgccgtggcttgcggcgatcttgacattgaggtggggatagccgatggtgttgcggatctgctcgtaagcgcggcccgcagcaaacatggcaaagctggaaacaaagggcacgtagccgcaggtggacagacccgcagcaacgcccatcatgttggcttcggcgatgccgcagtcaaaatggcgttcggggtatgcgtcgcggaacatgctggtcttggtggaagccgccaggtcggcgtccaggaccaccagatcgttgcagcccgcgtcggccagctcgaccagagcgcggccgtagctgtcacgcgtggcaatcagtttattttccggcatcagcgctgcgcctccttctccagcaggtcgtaggcctcatgcagttcggccattgcctgagtgtattcttcgtcgttgggcgccttgccgtgccaatcgacctgattctccatgtagctgacgccctggcccttggtggtgtgcagcaggaagcaggtgggcttgccgctgccgtgggagcggtcaaacaggatgaacgcctgttccagatcggccatggagttgccgttgcagacgatggtgttgaacccgaaggcatccatcttctgatccagcggctcgctggacataaccttgttggtggggccgtcgatctgcagaccgttgacgtcgatcatgatgcagaggttgtccagcttgtagtgggatgcaaacatgaaagcttcccagcactggccttcctcgatctcgccgtcgcccagaagggtaaagacgtccacgccggatttctgcatcttggcggccagcgccatgccgcaggcggtggaaacgccctggcccaggctgccggtggacatatccacgccgggcaccgtgttcatgttggggtgaccttccagatagctgccgtcatggcgcagggtgggcaggtcacgcaccgggaaaaatccgcgttctgccagagtggcatacagtccgggggcgcagtggcccttggacagaacaaaccgatcccgcagagggtccttcgggttttcggtgtcgacgttcataaccttgaaatacagataggtcagcacatcggcggcagacaaacttccgccgggatgtccgcattttgcgccgtgcgtcgcttcaatgattcccatccgcacgcgggtcgcagtcattttcaactgcaacgcttcagcttttgtcataacgcttcctccagatgaccaggatcaaggggtcaggacggagtttccgtccgtaatcacaacaatttcggcagtaaaagataccaccgcggttttattatacacacaaatgatacttcaccgcaacatatttttacaaaaaagcaccgtccggtctataatcgggatcactcgcagccggtacagtctccgctgcagtcctgtccgcccgccgatgcatccgccgacagggatgcccccgccagttccgggtccatggcctcggccactttcagcatcagagcgcactcgatgcgcttgcggaacagcttgcatccgtactcatacacaccgtggatgtccccggtggcgtgcagggcgttggcggcgcagccgccggcgcagtacaggcgcgcccagcagtcggcgcagttggggcgggcgtagacgttgcagagcttgaactcatcccgcagggcggtgttggtcacgccgtcccagacgttgcccagcttgtaatcggggtcgcccacgaactgatggcagggatacaggtcgccccagggggtgaccgccatgtactcggtgccggaaccgcagcccgaaatgcgcttgtagatgcaggggccgtgggccaggtcgatcatgtaatggtagaaggtgatgggcttgcccgccttttcccggcggagcatatccttggccagcagctcgtactggtcgaacagcacgggcaggtccgcctcggtcagggcttcggggttgcccgcagcgctgaccaccggctccatggacagctcagaaaagcccagatcgtccgccatgtggaacaggtcgttggtgaagtcggtgttgtagtgggtgtaggtgccgcgcatgtagtagcccttgccgccccgggccttgaccagcttctggaacttgggcacgatgcggtcatagctgccgttgcccgccaggtccttgcggaagcggtcgttgacctccttgcggccgtccagggacagcaccacgttgtaacactcccggttggcccactcgatgacctcgtcggtaatgcccacgccgttggtggtcagggtaaagcggaaattctttcccgcctgcttctcgatgctgcgggcgtaggccaccagctgcttgcagacctcaaagttcatcagcggttcgccgccgaagaagtccacttccaggttgtgccgcgtgcccgaatgctccaccaggaaatccagcgcccgcttgccggtctcaaagctcatcagaccgctctcgccgtggaacttgccctgggcggcaaagcagtaatggcagttcaggttgcaggtgtgggccacgtgcaggcacagagccttgaccacggtgctgcgctttttgaactcaaaagccttgtcggcgtaggcgtcgggggcaaacagcttgccggcggcggtcagctcgtcgatgtcgtcaaagcagtcggtgatgtccgcggcggtcacttcggaatgcccggcgtatttctgtgccagcagcttttccgcctcggcgcggggatgccctgcgtcgatgagggcaatggcatcataggccagctcgtccacagcgtgaacgctgccgctgtacacatcgaccacaatgttgtagccgccaagcttgtattgatggatcatagagaaatctccttgggcgcagcgcgcaaaaaaatggccggaatgcagtgcatcccggcggttgggtcattgggccgcaggcgaaatcagttgttctcagccttttcgcacggctggttggcaatgccgcagctggtcttgcaggcgctctggcaggaggtctggcactcgccgcagccgccgttctcaacgctcttcgccatgtcacgggtatcaagagaaagaatgtgtttcatacaaacagtcaccccttagtatcaaagttatcttcattttacacgccgccccgccgcttgtcaaggcgtgacggccctgtggggcgggatggcaggcaaaaacagggggattctctttattctccgccggtgccgccggtatccgttccggttccgtcggctgcctgttccgccgcgcgcttgcccgccgccagcaggctgagcaatcccggcggcaccggtgcgcccatgtcggcggcgttttcggcaatggaacccagttcggtaaaaatgtaccataccaggaccactggcagtaccagcaccgtgtactgcacacccagcccgggcagattttccaccacgatgcccaaaaccgagtcggtcacaaaagccaccagtaccaccagcagcatcccgcccttgtgccagatgcctgcccgggcagtggcgctggaccactccccttttgcggcggccgcggcgctgccgctgatccagtcaatggccatgcacaccacccaggccagaaccagccatcccagccacccgaaggccgcgccaaaggcccccacaccggcggtcacgatggctttgacccagaaaaaaatgttgttgtcatccatggtatccctcctccgtatagcgggagaaatattccccgccgcagaccagcgccagcgcccacatggtcatggcgtccccctccgacgccggaccgatgagctgcgccgtgacggtttgtaccgccaagcccagttcggccgcctttgcggcgatgtccgggtcctcccccacaatgcacatccgctgcagcttgcccgctgcggcaggcgcctcctgctccgccgggcgcgtcaccccgtgctctcctgcgccgtaggtgtactcgctgccggtggccagggtaaaatcctcgtccagccagaccaggggatttcgccgtacaccgtcccagatgacctcaaaatgcaggtgagcgccgtagacattgccggtctgcccggtatagccgatgagctgtccctcctcgacccgttctccctgcgccacgcaacaggaggacagatgggcgtaccgggtctgcagggtctttccgctgtagtccgcatgtctgatgcgcaccatgttgccgtagctctgcatcccggtcttggtgtgaccgtcccaggcctgcacctgatccacagtaccgccttccgccgcatacaccggcttgacgacgctgccgttctggttggtccgcaggtcgatggcctgatgcaggccgccgctgttataatagtaccccgccgtcagcacatgcagtgccagcggccagtgcaaaagcacttccccgttttccagtcgcatacgatttcctcccgtcacgccacccgctgccacttgtacacggccaaatagggcggcatattgttgtgggcctgtccgccgccggccgctcctgttgtccagcccgcagcagattccagatgttttccgctggaatacgacaggtcataattgctcgcatcacttttccaatggatcgggacctgatgggtgtgggccgggatctcattcagcgacagcgtatgtgttgcttcgcctccggccgacccggcaggatattcttcattgcagccgaaagtaaactttccggagatttccttccagctcccatacccgaagtgttccgcaaccttttctgccgtggacagatccgtctcatttccttccaccggtgcccagtcaaaaatatatcccaccggcatttcaaaccgtttctctgactgttccttggtgtaatacccggacaggtcagtcttgacgctggtgtttttccagtcgcccgtatcgctgtcccaggtccagatggtatccgtgcttcccacaatggcccattggccgttttttcccgtgggatgtgccgcccgcaaagcttcctcggtctcataccagccctgggcgccctgggctacctgctgggccagctcggcggactctgccgccgcggaagcgctctgtcctgcctgtgcggctgcccccgccgccgaagcctcgcttgccgcggcctgcgcggcgctctgggacgccgcctgcgcctgactcggggcttccaggatcgcatcaagattttcctcgatttcccggatggcctgtgcgttctgttccacgatctggccatactgccgggccgtttcggcgctctggcccgcatgttggacgctctcgtcgatgcctgccattttggcaaaggccgcatccagttcttcgcccgtcatcgggctgtcataatatcctgtttcagccaccggttccctcctgttccgcttgcttggcaagctcccgttccttgtcctccaccacatgcaccagattcaaaagcaccagccgcaccaccaccgggtgcaggccgcttttgttgatggctcccaccacctgttgttcaaaggcctccaccgcccgtcctgcgtccattgctgtccctcccttttctgtatctgtaccgccggggccatggggctgccggggaattccggccggggcgttttgtctccatggccgaacacgccgccctgcggcagacaggccgttaacagaaccacctccagcagcaataccgcccccgcagcccgcagctttctcatatttctctcccgttcaccgccagtgtcgtacactcgatgcgccccgggatctcaaacttgctggcgttgcagtggatggttgcgccggtctggtcaatggcaatgcccacaaagttgctgtgcgccccgccgctggaccagccgaaatccggcgtcccgctggagaaccaccccaaaaaggtataacggctgttgtcaccgatataggtagctccgtacttgctgtacaaaacccctgtcagatagcttttgccgccattttccacataccatttgatgccccggtcatccatctccacccggcttccgttcgagcgtccggtgcgcagcgtaccggcgtccaggtcgtagacggtattgcccgcctccgacccgatcttgccggtggtgatgttgccgccgttgatggtagtgcctcccgccgcggccagatcctcaaaggtcaccatgccccggaaggtgatttccgcgctggacagcgtcaccccacccgccttgaggatgagggtgctgctctggtcccccgcctccgccgacagggtcagcccctgcaggctctgctggatcatggtggacgcctcgtctccgtccagcttgccggacacttcggtgcgcagtccgtccaccgtcagctccagcgacgccatcccgcccgacagctccgacgccgtgatcttcagcccgtccacatcagcggtgatctccagcatcttgccccgcaggttggaatagctctgccggttcaccgccgccgtggaatcccgccgggcgttgccggtgctttccagggtgcagcgctggccggacaaagtccgttccatgatgcaggtctgcatggccctgccgtaggcgtccgccaccgtcaccatgtcgccgggctgcagcagggcctcccccgcctgcaccgcgacagacagcggcgtgtagcagagattcgccatctcttcgtaaatggcctgtgccaccggccgcagggcttcggcggattcggtggtcagcagcagattgccctggagcatcagagcgttggtcccctgctcctgcgccgggtaaatgacccccacatcgtcgtccgactgccggatctgcaccttgtcgatgcgggcggtggcgtactcttcataggtcagggttccggacagataccccgcctgtctcatgccgaaccgccacacctccccgccggcagtgcgcagggcaactcccgccagccgcaagccgacacgggcatccggattttccgccggtcccaccccggcagccgcagactcgcggtaccagccgaattccagcgttcccgcccccgtcatgcgggcaaaacggcaggccgcctgggctgcccattgaatgaactgccgccccgtcaggtcgtcggcatagaaagcctggatctcatacccggcattgggcagaccatccagcgccccttccgccagcaccacaccgcactgtgcgcagaccgcccggataaagtccgccagagccatgggaaaagcgccctgctgttcccgcagccagggggaaagcgttttgtctaaaagggtcatgcggtcgtaggccgtgacccggatgacattggcgctgaccttcaccggcttttccgccaggaatatccccgtctgtgtttccctgcccgaacttgtatccacccgggtcaggatcagttcctccccctgggtgatgctcaggccgttttggggcgcccacagttcgatctcggcacaggccgcacaggctgcaccggggcagaggtcggtctgatcgttgacctgctcggtcagcgtcacgctgcggatgatccccgcgtccagcacggagccgtcgggcagcgtcagtttatgtaccagcaatctgccaccccctcagcactggatgatgttgaacttgtaatttttgtacagcccgttccggcttttcaggacaatgctcgtcttggagcagtatgccgtgatggtgcggggctgcccgtcggagccggtgtaaccgaaggcaaactgtgcctttccggccatcagctcttccagacaggcatagtcctcccggtccagcagggcgtaggaaaacccgaaggtcgccaccttctcccgcaccacgatacggtgcatgacgccgtcctccgtccggccgctgtccgacgcatccaggtcggaaaaactcagttcggcctcctcatccggttccggcatgggctggccgtcgatggtgtactgtgtactttttgcgcggatcataccacacctcccgtcatgaccgctctgcggtcgttgtagcgccgggccgcccggccgatgacctcatccccgatgacgatctccccgccgttttcccggatggcctggatgatctgctgggccgcggtcagcaccgcgtccaccacgtcgccgttggcatcggataccgcccgggcgatggccgactggggcgccgcgatctcggggtcggaagccgccccggggtactcgcccatcatggcaagggtgggctggcggatgacgccgccggacgccagcatggggatctggggcgctgccacatggccgacggaaaacccgatatgggacccgcccagccccggcacccagtcaggcaccgtaaaggacaggctgttgagggcgtcggccaccgcgttgatgcccgccgcaatggcgctgagcatcccgttcacaaaaccgatgaccccgttgaccgccgtgcggacaaggtcctgaatggaagcccacacactgtccacggtggcgcgcacgctctcccaggcggcggcccagttgcccgcaaagacgttggccatgaactcggccacgccggtgaacaccgtcaggatgacccgggcggcatcgctcatcaaagccgccgcggacgttgccgcctgtcccgccacggtaagcacctgggtcaccagcggaccgaacgtctccgccatccagttgaggaagggcatcaggatgttgttccagtagttgagcaccatggtctgccccgcccccagcagctgcaaagcctggttccacaggggcagcaagtgttcgttccacagcgattccaccgccgccagaaacgccgtcagcaccggctgcagcacgctctgccacaggttcgtcaccagcagcatcaggttctgcacccccagcgtcaccccgtccagaatgggctgtccccaggtggtccacgccgccgagatgcccgccatcatgccgttccagatggtcagcagcagttccagggcaggcaccagcacgctggacactgcctgggacaccagggtgcacccggtctggaaggcggtcacaaaagcgttcataagggtggtcagcacccccgacgcgatgggcgccacggcggtggaaaagctgttgtagatacccggagcaaacacgcccgccagccaggtcagaaaaggcagcagcgttccctgccaaaggcccgacgccgccgacgtgatccccgcccaggcgcccgccgccgtatcccggatgcttgcccaggcagcagcccacgccgcacgtcccgtctcggtcaggctgttccaccaggcccagaactgggccgcggcggcccggatgcggtcccacaggctcagctgcgccgcgccgtcctctccgccgtcctccttgggatttttccccttggacgaacccgaccccgagcccgagcccgacgtttttgccgcggcgggcagtttttccagctcgtcaaagctggcggtgtaccgtgccgccgacgctgccgcctttgcggtggccgtggccgtttttgccgcggcggatgccgccgccttcatggcggaagccgccccctgggccgcgctctccatctttgtcatgcttccggccgcagccgctgccgggcgcagcgttgcagccgccgcggcggctgcggcccgccacccgtccctccccacggagggcagttcatatttttcggttttggctttgtacagtttctccgccaccgccgttcctcctttcagccttgtttccgtttggtctctgccgtctccccgccgaacatccgcgccaactgtgcctgcaaggcccgctgcgccccggtatccggcttggtctgccccgcccgccgggccagaaagcggttccagtcccgccgggccctgcgctgccagagtgtcatccgccgcaacgcggcggggtcacgctcggtgcgcaccgccaccagcttgcccaggggggtatcctccatcaggccggacaccaggcgttcccattccggccatggcagttccctctggacggcgggcagcacgccgtactgggccgccacgctctgcaaaatggcgtcctcgtcaaacatcagatcgtatggagcctgcccggcaaaaaccggttcagccctgttcccgtgcggtgcgaaatcgccggcggacgacctcagcctcctcgccggtcaccgcggccagcaccagggcaaacagttcctgtaccgccgggtaaggcagattcttttcctcaagctctctggcggcctggctgcccagagccagccgaaaggcctcgctcagctgcgcctccggttcggcgtccatctttgccatcacccgctggatctgcatcaccgttttctggcggttgtccaccggatagaccttgtcccccacacgcacctcggggacttcggtcaaaagtttgtcgtcaagggtatacagtttccccatggtatcctcctgtaaaatgattttcccgcccacccgtcggggtcgccgccccgttcccttctgtcaattcagctgtttcggatcagcccgcggccgccggggtataggtgggcttgccgtcgctgtgcacctcaaattccagagctgccacgtcggtagcgtcgccgctgccggggttggtcacgctgagcacacagtcaaaggccagcttggccccatcggggaactcccactcaaacttggtgtcgcagtcgctgccggtgccccaggcgttggaggccacatagtcgttgccctcgtcgccgatctcccgcttgccggacagggtgatggtcaggctcttgcccgtgaccatgcggcgcttccagccttccgcctccatgggggtccattcctccacgttgccgtcgatctccaccgagaaggtctccagactggacaccgccttcatgtcgtcatcgacgctggtcctgcccttgattccgatcttgaacttgttttcaaacaccgggtaaacgccggttcttgccatttgccttcactccttttgtcattttcttttgatgtacgggcgtgttttcagcgcccgtaataaagctgtacccggatcaggtactcaaacaccccgtcgccgcccttgcccaaaggcacgggaccggcccccgggtcggcccaaaagaccagcgcgccgtccatggtcagcccggtctggccgtaaaacatggcccacagcttttgggcctgggcttcggcctcgggctggctctggccccagcgcagcagcagccgggcggtcatcacatcccagtgggtgcattccgctccccccaggcagacctttgcccgcccctccgccttttcctcccggtcgtcaaagatgcccaggaaatagggtttgctgccgtccacgctgcccaggcgcacacactccggtcggtcaaagcgcggggccagccagccgtacaactgtttcagcgtcatgccgtttcctccccttttacgccagtgtcagccgggtgtagttcacgctgccatcaggattgcgtgccttggccgccgcctcgatgcgccagctttgcccgccgatctccacgctgccggtcagcacctcccgctccggggcgatgtcgccgtcaaacagcacggtaccggcacgtctgcgcaccacacgctcggcgttgatgctcctccgcgcgccgtcgccgaaatcccggttggggctgatgttctcctggggcgcgtcgtccagacggcacatcagggacagcaccagcaccccgtcgggggcgccgtcggcggtctctccgtcggtcagcgtcacggtcacgggggtgcggcaaagttccggccgcaccagtttcggccagcggcggctcatggtcccacctcgcggcagcaaaggccgctcaggagcagcagctcctgcatcccggtgcagacgccgcagtcttgggcggcagttccctcaaaggtcatgctcaccccgcccacgtcgtactgtttcaggccctgccgccaggccgagccatcctccagcagccagtttgcctgggagcagacggcccgccgcaccagttcggcggcgcgctcaggcagggcttctgccccgcccgccacctcgatccgtcccagggtcagccggtcggcgtcccggctggcctgccacagcgcccggtccaggtcctccccggtcagggtctcgtccgcgccgtacagttcctcatagtcctgccgggcggcatagctttgcagcgccatcgtctcaccgtcctcaggacacggcagaggtgtcgatgtccacgtagacgctgtcgatcttgccgtccttgccgttggggaaggtaaagacgtcgctcagcgcgcggttctggtagaggtagccgtcgccctcggcgtggccgcccggggcaaagaagtagatgctggagatcttgggcaccagcttggtggtcagggggctggcaatgagcacgttgatcttgtgcgcgccggatgccggggcaaagccgccgtcctccccgtcgaacttgaagtcatcgtaaaagacctcgtcgtccaccacttccatgatgggcacgccgtcgatctcggtgacgcgggtctcgatgccggtaccgccgtcggcgatgcgggtcagctcgatggtgtgggtcatctcgggggcctgctccagggcgttcatgacggcactggacacataggcgatgagggccccgcgggcgcggtaacggcgcagcttgccggcggccagcatggtcttgagcttgccaaagaccgcctcgggggtaaagtcagcggcagcggtggagctgttgtagcccgactctttcttggcagcagccgccaccttggagaagaacagagcgtccgcttcgggggcggcctgggtctgctcaaaggtgcgggaaatgttcatcaccgatgcagcggagttgctctcgtccacgtcggcgcggtcgataaggaactccacatcgcggtcgtgggtgaccacataggcgtggtcggtctgggtcacgttgccgcggttccagccgccgtcacggctgtggttcttgtagccggacaccgacatctgggtaaaatggaaggtcttggcgtccagccagcggacgttgtcggtgacaaaggggccgcacagggcgttctgggtcatgacctccagcagttccgactgccagctttcggcatagttcacggtattgggcatgtatcatccatcctttctttgtttgggtcacttaaagcggttccagcgccgcttttcgggttccggctcatcgccgggcgcgggaatggcagcagggtcggtgtcggctcccagacggaagcccgccatgccccggccgccgtttttccagtcggggtgccgctggagcacccctgccatggcacgggtcacgctctcctcggtcacttctccctcccgctgtgccgcgccgatggccagggtcacggcgtcctccgccagttcggggtccacccccgccgcgtaggccgccagacggcaccgcgcctgcagaagctcccgctccagctcggcgatccgcgccgcactgccgtcctcctcccggggtccggcaggctcggcgggctcctcctccgcagcttcctccgccggttcggtctcctccggctgctgtgcgccgggggattccggggcctccgccttgtcggtctcgggtaccgcctgctcagggccgggctttttgtccttttccttgtcggtcatgttccttctcctttccgcccgtggggcttttgtatcacaaaagggcagcggaccaaccggccctgccgccctttcgctcctgatgatttgccgggcttcagcccgccgcagtccgctcactgcggatgcgctccgcctccgccgctttccaggcatcgtccttgctggcaccccacagctcgtccacctgggcctccacgctcatgatgcctgcctccgccgcctgggccaccgtcttgacccgctcctcaaaggagggcgcggcgtactccccaaagcccgcctgggcggggtaatgtccgggggcgcggccctcggccagatcctgggcctgcaaggccgcctgggccagcaggggtagtgtcttttccagcgccgccgtaatggcgttgcgggtaaagccggtcacgtcctttttctcccgctgtgcctcggcggaagccatccgtcccaggtcgatgcccaacgtcgccggactgagcaccccctgaagacacaggtccagagtggccgcgtaggcgctctcaaaggcctcgtagcggatctccggctgcaccgtctcgatgcggtcggcggcgttctcccggtcactggaggcgatcttgacaaagctggccccaaagcgtcccggcacccgcagagcccccgtctcggggtcccgggggatcagacactcgggaatgtaccgctgtacccgcccggcccgcacggcgtccagccactggctgatgatctcgtcgtgggcatcaaaggcgtcgtttttcttgtcaaagatggacgccccccgtcccggccagcgggcgctgggccagaacatcagcggcacggccagggataccgccgggtcaaaggcggcgtcccgcagccccgcgcactcctcctcggcggagagaggcaccggtttgccctccgcctccagccggtaggtcacgctgccggggcggtattcctcgtacagcaccctgcctttgcgtcccaccggggtcagaaaatccactccggtgatacggccatggcggcgagtgtactccacccggtccgcgccgtaaaattccaggatcggcccctccgccgcctgggggtccaggctgatcttgaaggccccgtctccggtgaccagacactcggacaccgcccggcccaccagggcgtcaaagtcgttgtcccgggcaatggcctgccagcgggcggaggcctgggggtcctcaaaggtcagttcccccagatccgcccgcacgatgcccgccagcgtgtccgccatcacggcgggcagaccgctgtgagccttgcgcaggttttcactttcgggagccgccgcccagaaccttgcccggcccacggcatcctcccccagctgcttgaacagctggtccagctcgctggcgtcgccccggtaccaaacccggttgcgcagcacattggctccgtggcccaccggctcccggatgctcatccggcggccctgggccggctggatctccagccaggtctgcaacatggtcctcatcctttccatccaattcatcctgtttcctcctcgccttatccgatctcctcccggtagggcatccaggcgtactgttcggcgttgatacagtggtcgttgccgtcctccgggcggccgtccgcctcccagctgtaacagtccatctcctccagcaaaggtccacagccctcctccacaaacagatgcatgccgtgggccagccatccgctctccagccggatgcggtccagcaccggcagccctttccaggcaggcagatactcatacactccgcccttgagccgccggtacttgcggcattcggccagggtagcctggtcggcgctgtcgatgaacacccgccgcccgaacccccatgcgccccgctgttcctccagaaattcctccaaaaggggcggaatatcgctgggggccagcacggacaagccctgccgggcccgctccttgttggagtagacccgcaccgccagcgtcaccttgcgccggtcctccagaaacccgtcaaacacaaaggcaaaggtatcctgggtgcgctgactgtaactggtgtccaccccgcaggaaaagcgggcaaagcggatgctccccgcctccagctggcgccgcagttccgccgcgccgatgcggtgggagggacccacttcaaagatgacgccctctccccggccccgcaggcccagaaccttgttgcggtagagcctgctgcctgcgggggcgttttcaaagatcctgcgccgggtctcttcgctcagggcggcgttgtcctcaaaaccgaaaaaccagtgcacccacccggttttgggcggctggcacagctgcttgcggatctgctccggggtggagctttcccattccggcaggggtcttgcatggttgatgtactcgtcgtataccggtttgcgggggtcgtcggggttgagggtggccagcaggtaatcggcccgcatggcggcttcccgcaggtactccatgtcggcgatgttcacctcgtcgatatagacgcagccgtactggccgcccaaggcttttttccaccgttcccggttgccgtagcccagcacgtagatgatcctctccccgtcggaggttttcagccggatgtgggcctgggtggtcttgccgtatcctgcggggtaatactcggccaggggtccgaaatcgtccagaatgccgaattccttgttgataatgtttttctccaccgtgccgatgtccagccccgacaggatgtgcagcttctttccgctggccgcacaccgcagcataaatttcagcagcgccaccgtagtcttgcccgcagcggtggtcccttccagaaactcacaccgcgcccggcagcgcagaaaggccatgctcttggcggaaaatttcaactctgcccgcaatctgcttcgtcctccccgttccagtgtcccgccgtgcatccccacagggcgttcagcacttcgtccagacgtcccgcggcggcggcttcctcctgcttgccgctgtccgccgccgcattgatggctttggcgcacagctccgccgcgtgcatccgctggcgcagttccaccgtctcgtcccgcatgacgtcggcccacatctgctcgatctctttcatcctgaccggcgaccgccgccgtttcggcacagccgccggttgagcgccgtctttcgcccggtccatctctgtccgcccccctttcccgctccaaaacccgaatcatcgccgcaggcataaaaaaatgcgtccaaacccgcataacgccgggcttttccgcctttttcctgctgtgatttactggcaaatcccactgttttttgcctggattctcccgtggaaattccgccctcctgttttgttccggtgcgtttttccagtttagttatagcacgccgtcaacggggtctgcgagggtcactgtgcgccctcttttgctctttttgccttctttcgtactcacttttccttccccgcaaacagcaaaaaggcgacgcacatctgtaaactcacagatgcacgctgcccccaaaaatcagcttttttgacgtatttatgtttttatttgagttttttactcttcgccgcccagttccctgcggataaacggcaccacatcggcgggctgaatgtccagcaccagagcaaactcggtatacagggcattttccgcctcccgcatggcgttctcgtcaaagccggacagccgtttgcctacggcacggcgggcgctgcggaaattgtagatggccttgaccatccgcagcagttcccggtgatcgccctttttcagcgtttcattgtagtattgacggcgcacgtccgggttcgggtcacactggacatcctcctccggcagctggcggatcagggcaaggatctcctccctggtcatgaccggatgcatccgtgccatcagcaggtcatttgcctccggcacacagatggtcatgctcttgtcaaacaccggtttcaacacaaaacagttctgtttctgatccccaagctgccgttcctcgcgggaggcgatttggcaagctccggtcgtaccataacaaaccatatccccaacctgaaacatctttccgctccttttctcaaaaatccgcttaaaaaatcgcgataattcgcctactatatagtataacacccttttccaaaatatgtcatggactttttgaacaaaaaaggcaggctgccgcgcgggcatttttgcccctttccgcgcgcattgcaaaagggtccggcaaggggtatactgatagcaaaccatccacaggaggtcttttttcatgccggatatcctcaccgccgccgactttctctccatccgtccgcaatacaaaaatgaacaggcggagggcgagcttcccgccgccgtggagcatcttttcccccaggggacgatgatcgaccattactttgtcacccccgccccgtccctgctggcggatgagaccatcacctccttcggtacggtcagcgctgtggtgttttgccagcaggagggcggcgccccctggcaggtgcattttcaggagcccaccatggtgaaggccctctgcatcgacatgccggacgccgagttccgtgccatgctgtccgcctcgtcggtaacgctccccggggagacctgacgccccgccttttccaccgcctgccgttccggcccttttatcaacaaggaggtattttccatggaagatttcatgcagttcctgcgcacccgccgtacctaccgccggttcaaacagacgccggtgcctgccgccgtggtcgatgatattctggaagccgcccgcattgccagctgcggtgccaaccgccagacgctgaaataccttgtggtgcaaagccccgaacaggtggcaaaggtgggcgccctggtacactgggcggcctacctgcccccggagcagggtacccccggcccggaggaaggccccaccctgtttgttgcggtctttcaggacgacgccctgcccggtgccaacgacactgacgccggcctggccctgggcagcatgaccgccgcggcctggtcccacggggtgggcagctgcatcatgggcgccattgaccgccccgccctgtgcgatctgttcggcactgcgccgtccctgcgcctgcacagtatggtagccttcggttatcctgcacacgaaagccgcgtggtggaaatgcgcgacggcgacgtccgctattacctggacgacgcccgggattactgcgtccccaagcgtcccctgtccgagattttgctcggtcgtttctgatcctttttcccgccgttcaacgttccgccgggccgggatgcaccgctccaaaagaaggcgctgcatcccggcccggcttgtcatatgcggtatcattagcccagactaatcccctttcaatgttctttacgtcgcagcggcatgttttctcgggatcttttcaccttttttctcaaaaaaacagggaagaaggcggcaaaatcaggcttttttctctagtcaaagcgctattcatatgctatactaaatgcaaatttcaaggtggatatttaccggaaaggcggttttttctatgcgtaaatcgactgaaaatgcagagcccaaggctccgggcagaccggccaaaaagcagccggcccgcaaggcccatacccctgccaccgagatctaccttcaggtcgccggcaaggaatacgactgcgccgcgctggtggaacaggccaaggcggactatcgctccacccacaagatcggcattcattcctgccgcgtctatatcaagccggaggaaggctgcgcctattacgtcatcaataaggtggacggcaagattccgctgtaacgccgcccggtttcacaacgcccaaaaacgcccctgcgcatcaaacgcaggggcgtttttctgttgctgttttggagcagccgccctcacacaagggcaaacgcccccgaggcgccgctgtcctccaggcccggctggcgcaaaaggccgctctggtaagcgtccaccagcttgcgcaggtcgcagatcatggcctggcgttcccggccttcgtcggtatcccgcaccaggacccgccggggtgcaaggtagatgtactcgctgcgggagtcaatgtcctcgtcctcccggatggccttctcggtgctttcaaacggctgatgggtgcgcagggccagaccccggctgttgtagaccagggtgtaccccgcaataccggtgcgctgatggtatgcccggcagaacccgccgtcaatgaccaccagcctgccgccgcccttgacggggctttccccctcgatggcgcgcaccggcacatggccgttgatgatgtggctgcccgcatcaaacagcccgaactcccgcagaattttctcggcagtctcggcccggtcaatgtgggtgtaatagggatttttccgctccagatgggtctcctcatcggcaatgtacatccgctcaaaggtggtcatggcgctgcggccgaacaccggggacccggctccgcaccacagataccacaaaaagtcctggcccgctctccgggtcatgctgccctccggcgcaaagtatccctgccttgccctgcggtcacagtagtcgaacagcgcccgcccggcgtattgcttgccctcaaactcctcggcggcgaaccgtccgtcgggagtcatgggcaccgcaccgtggtagagcaggttgccgttgatgatcttgtacagaccgccccgggcatagaggaactgcacgtgcctttgcagccgttcgctctcccggaaagcccgcaccatctcgtccaggatgctctgctcccgggccgtcatgcgggcggggcagtccgggtccacggtaggaaatccgttgtccagcagagggtaatccctgccgccgcagcggacggtacccgcggcgtaatcgatctggttgatgtaatcctgcccctgcatcccgaaatcggggttgcgggcaatgaccccggcctccgccttgagcagcatgacggtcacagccttgtgcatccgcgccacccgcataagggtggcctcgttgttgtggccgccccgggcatggggataccaccgccccacggcgctgcatccgtagacgctctcggcaaaatgttccagcctgcgcaggctgatgccgtagccgttttccagcagatccacgttgtcgtactggagggaatttttcaccaccgtcagcacacagacggggctgcccgcggcggcccccatccagaccacgtcgtggttgccccactggatgtccacatcatggtgggccatgagatgatccaggatgcggtcgggccgggggccgcggtcgaacaggtcgcccacgatgtgcagccggtccacggccaaccgcttgatgacctggcacagacgcaggatataggcgtccgcccggtcatagcgcagaatgctttccacgatctcgccgtagtacaggtctttgtcgtgatcctcaaaatgggcatggagcagctcgtccagcacatagccgcagtcggcgggcagacagccgcgcacgtgttcccgggtgtgcttgctggacacaaaccggcacaactcgatcaggcgcagaagcgtctgccggtaccaggcgtccagatcgctctgggcggccttgagttcgggcagcttctgcgccggatagtagatcaaggttgccagttcggcccgctgacggggcggcacatcctgacccagcacggtgtcgatcttttcccggatgaccccggatgcgctgttcaggatgtgcacgaaagcctcatgctccccgtgcaggtcgctcataaaatgctcggtgcctttgggcagacgcagcaccgcttcgatcttgatgatctcgctggctgctgccgagatggtgggatactgccgggccagcatggccagataccgcagctggccgtcgctgtacccggcgccgcccctcgccccgctcacagcgtcacatcgctgccgacgcgggcagacaggtagatcgcctgtacgatctccagcgtctttttggcgtcctgcggcgtccagggcatggcgcggccttccagcagcgcctcatagcagtcacggacctggatttcatggaaagcgccccagtagctttcgcccacggcggtgccggcggcggaatcggggtggatcacctcgcggcgtccgtcgttccagcggatctccatctcctccagggtcagcagggcggttcccttttcgcagctgatctccacccggatgggactgctcatggtgtagtagttgcaggcaaagaaggagtacaccgcgccgttttccagggtaatggcggcgtcggcctcgtcctccacctcaatggtctgcaaaatgcggcgggcggtgtggccctgcaccttgacggcctccatgccggtcatgtagcgcaccaggtcgatggagtggatggcctggtcgatgaccacgccgccgccctcggtctcccagcggcctttccagtcacattcatagtagctggcgggacggtaccagttcagggtggagaatgcgcccttcaccgcgcccagctcgccgctctggatcagctcccgcacccggcggacaccgtcgatgtagcggttctggaagatgacgcccagctgtttgccgctggctttctgggctgcgatcatgcggtcggcgtcggtcagggtgatggcaatgggcttttcggtcagcacgttgacgccgcattccagcgccgccacggcataggtgcagtgcaggtggtggggcagcagaatgtgcaccagatcggggctgcattcggtcagtttacggcggaacgcttccggctccaccgcatcggaggcctcgcatccggcaaagccggcggcaaacgtctgagcgcggtccagatgcttgtccatggccagcaccacttcacacaggccgtccagatgctccagcgcacttttgtagaccgcggcaattctgccgcagcccaacaccgcaacgcgcagctttttcatcggtggtcgccccgctttcacagcatgtcccgcacgccgtgcagatagctcagcgcacgcagatagctgttcttgtcaaagttgccgatctcgtattccacaatggcccagtcatccttgcccagggtctcgttcagcttgcgcatcaggcggggatagttcatgtcgccggtacccagagcaacaaagccggtgtggacctgctcgaatttctgtgcgctgggatcttccgccttgcggtagtcgcgcaggtggacatagtggaaccgtccgggatacttgtccatcagttccaccggatcgtagccggaagatgccgcccagccggtatccagggcaaacatcacatcgggagcctgttcggccagcgcgaaccagatcagaccgttgtcgcagaactcccagctgtggttatggtagttgacctgcacgccgtactgctcccggatgtcccgggcgatgtcgttgaggttcttggtaatgatggccaccttttcggggtcatgcagttcctcggccacggcgccctccttgagggtgcgggggttcagttccttgaccatctcgccgtagccgcaggcgccggtggcaatgatgttcttgttgggcaggggcgccacaaagcgggcgaccttttccagcgctgcacggctcttttcggggtcatacaaaaggtccagcaggttgaggttgttgcagtgcatacctgccagatctacatggtacttgtccagcacggtggtcagtttttcccggtcatccacgccgaaaaagcgctcgcccagctcgcagccctcggcgcccacttcggccagacggccgatgacggcatcggtatcggtggcaatttcaggtccgaacaatacgcaatgtgctcccagtttcatggtgcatcctccttattcttccacgttcaggtagacggtctcgccgcagtcggctgcttcctgggcagcctggatcaggctctgaatgtactggccgcgctcgaaggtcagcaggctctccttgccggtctcgatggcatccaggaactggcggatctcgtagtagaagttgatgtcaaagggaacgcggggggcgttctcgtcgccgccgaagcactcttccggcacaggcacgacctcgggacgggaggcatagccgccgttcttgtccttgagctgcagggtgagctcaaagggacgggcgccgttgaagatcatcttgccgccctcgcccacaatctccagcatgaaggtcgcgccgatgcggctggcggtgaagttgtacagggtgccgctggtggtgcggcagatccagcaggccacatcgtcgttggtgaccttgcccatcttgccggggcggccgatgacttcacgctcggggatgcagatgtcctgcatgcactgcacttcgcagatggggccgcaggtatcccgcagcagatagtcgcagatgtccatcatgtggctgccgaagtctgccagagcgccggggccggacagatccttctgcatacgccattccagcttgacgtcggggctggcgatgcggtcgccgccctgctcctcgcggacaaagaagacgcggcccatcttgccctcgtccagcagcttcttcatgtagacaaagccgggaatgtcacggtagcacaggccgatcatggcgaccttgccggtcagcttggcgtacttgatggcctcggcgcactcctcgggggtgggagcgaagggcttctcgcacaggacgtgcttgcccgccttgagggccgccaccgacagctcgatgtgggtggcgttgggggtgcagatgctcaccgcgtcgcacaggctgaacagttcttccaggctggcgcaggccttggcgtcggccagttcaaacttgtcgatgtagctctgggcgcggccgtccagaatgtcgtagacggcggtgatctgcgcgtccttgcagtgtttgtaggcattcacatggttctgtgcgatgccgatggtgttgccgcttccgataatgccgatccgtaccatgttgtttctccttttctcctgttggttataagtatttttatattgacttatctctgatttatttcatggactgttccaggtatgccttgccgtccagcaggccgttttccaccgcttccagggtgccttcgtaggcggcgtcctcatgctccaggctgatggtgccgtcgtagccgtttgccttgagcatgcccaaaagctttttccagtccagttcgccgcggccggggatgcggtagctccaccagctgaaatcggtcaggatgccggtctgggccagctgttcccggtcgatggccgcgtccttggcatggacgtggaagatgcggtccttgaactcgtcgatgggcgcgtaggggtccaccatttcccagaccagatggctggggtcgtaggcgatgcccagtttgttgctgtccagacgctcaaagatgcgccgccacatcaccggagagatggcgatgttgcccataagggggcagttttcaaagcagaggcggacgttgtttttctcggccagttccagcaggggaccgaacagatccaccacccggtccagactgcgcaccgggatgcggcggatcatattgccccggtccttcacgttggggtcacggtcgtagatgccttcctcgatggtcttgtcgatgccggtggaggtcaccaccttgtcgatgcccagcgccccggcaaactcgatgcgctttttcagctcggccagatgattggcggcttcctctgcgtcggtgctcaggtagttgcggcagtagatcagcgccgtgatgtcgatgcgccccgcagccagtacccgctcataggcggcgcggtccagcggcagcatggggccgcattccaggtcggtaaaaccatggtccgcagcccagtccgccacctgatccagcgtactgaaggcatcgctgcccgaacgctttgcctgttccaccagtgcattggtcagaaacccgatcttcatagtcatcctccgttgttgtgtagtttccgctttccttttcactgcatccattcccggcttttgcccggccttatacacccggaacaatttcgccgcggcctgataaaaacagaccggccgcgtctttcggccagccgatcccgccaagttccggcataggattccagaccaccgggccgggacctgccgcccggcatttgccccttgtttttgtgtgcggtccaaagggaaaaattcccggtttttgcccggccttcccccatccgcacagactcccgccgccgggcagctgcgggagtaattcagggcaaaattgctattgatttgatttattaatttaatcaaccatctaaggcatattatagcctcgccccgccgcctttgcaagggttcacatttatatttccgataaaaaattcttttttgtctattttgtcagttttgtacaggcttttttggcggtttcgtcatttaggaattatctgacaattccttcaaaatgtggtatgatataaaaaggatatttatattttataatcttaataaatatatatttccctgttatttccttaaaatctgacagaaagaggggcgtcatacatgcccatgatgcacggcaaaaatctggccaagatcaagctgcaaaatctggaatccatcaagcggatcctgttccgctatgcacccctatcacgcgccgaaattgccgagcgtttggagctgaccccgcccacgatcaccaatatcgttgccgagctgatccagcagggcgttgtgcaggaacttaccggtcccagcaacgccgttgccacccacggtgtaggccgcaagcccatcaatattgatttggtaccgggttcccggctggcgctgggcgtatccctgggacgtgatttcacccattactgcatcaccgacctgcgcggcggcatccgcgcccagggttcctatgaccttttgtcggaagattacgacaccatggtcaaacagcttctccgtcttttgaacacgctggaaaagcgctatcctgccgagtgggagcgtctcatcggcatcggcatcacggttccgggcatcgtcaacgcccacaccggcgtcatcaagaacctgggcaccgagcgtgtcagctggtgcaatcagccctttggcgagacgatcagccaggcaacgcacctgcccgtccgggtggagaacaacgtccgtgcccgggcctgtgccatctcgctgttccgccccaacctccttgccgaggacaccacctttgccttctgccacgtggcatggggcattgcctgcccggtggttttgagcaaccagtccttccgtggacaggacgccgccgcgggcgagatcggtaaaatgatcctggaccccaacggccccgagctgcccgactgcggcatgcccggcagcctggaagccctgtccagtatgcgtgccgtgctggaatactgccgtcaggccctgcgcgccggggaatgcaccgtcctggccgagctttgttccgaccccgagcagctcacactggagcaggtgctggaagcccagaccaaaggcgaccccgccgtctgccgtatcctggaccggggcatgttctacctgggcattgcgctggccaacatcgtcggcttcctcaacccccacctgattttcctcagcggtcccatgttccgcaaccgggagaacttcgacacggtggagcgctccctgcgtacttacgccttccgttccagcgacgaaaagctccagctggtctatgtggatctgggcgaatacggcggtgccgtgggcgccgcggcaagctgcatcgaaaaatacttcctgcgggagtgacccccgcagcgtcaggaccgccgattgcgacggagtttccccttttcgacaaacaggaccgccggataccggcggtctttttttctgccgtccccgcccttgcgcagcctgacttttgcccggcctttcctgtcacagccgcccggcacccctcccctttttctgcatacgggcaggatctcctttcctgttttctccgattttccccatggtttcgttccaatttttcccgttttgactttttatgcgctccagcgttgacaaaccatgcaatacacagtatagtgttactgtaaaatccgccgttgcggagttgtggattttttcccaaagcaattcgctttccttttcgccacatgatcgcctggtgcgttatgcaccggatcgtgtggtatttttttgccccgatgccggtgcgcgccccctcatttcccatcttacggaggtaaacaatggatcaggtatttatgaaagaacgccctgtactgccgctggtcatttccatggcactgcccatgacgctctccatgctggtcagttcgctgtacaacatcgtggacagctactttgtcgcccagatcagcgaggacgccatgaccgccctctcactggtctacccggtgcagaacctcgtcacctccatcacggtgggtttcgccatcggcgtcaatgcggtcatttccttcctgctgggtgccaaccaaaaggaacaggccgactcggccgcgtccctgggcctgtggctcaacatcctgcacggtgcggtgctgaccgtgggctgcctgctggccatgcccgccttcctcgccatgttcaccgattcccaggccaccatttccctgggtctgcgctactccaacatcgtgttctggttctgcatccccatcgcggtgggcatgtcctttgaaaagatcttccaggccgtgggcaaaatgaccgccaccatggtgtgcatgctcatcggctgcgtggcaaacatcattctggaccccctgctcattttcggcatcggccccttccccgccctgggcatcgagggcgctgccatcgctaccggcctgggccagtgcatgaccatggccgcctaccttgtattttatgccacgggcgctttgcccctgcgcatccgcctgcgcggtctgacctcggtgggctttctcacccgccggatgtacctggtgggcattcccgccacccttagcctggccctggcctcgctgctcatcaccgtcctcaacggcatcctgtccgccttctctcagacctacgtcctcatcctgggcgcttactacaagctgcaatcctttttgtacctcaccgccaacggcgtggtgcagggcatccgcccgctcatgggctacaactacggcgcgggcgagtaccgccgcgtgcgccagatcttccgcaccagccttctgatcatcgccgccgtcatgctggtgggtacggtgctctgcctggccgttcccggcgccctcatcggccttttcaccgacaatgccgagaccatccgcctgggctcgggcgccctgcgcatcatttccctgggctttgtggtgtccagcctttcggtcactgcttccggtgctctggaaggcctgggcaagggcatcgaatccctgtgcatttccctgtgccgctataccgttatcatcctgcccctggcctgggttctcagccgcttcctggaggccgacggcgtctggcatgccttctggatcaccgaggtcctgaccgccgccctgtcctggttcatctatcgccgcgccacctccttttcccgctgacaccgccttgcttcccgccctgccgtccgctataatggaagcaacaaatttattggggaaaggtttctaccgccatgcagttcgtcaattttctgatcaaaccggcatccagcctgtgcaacatgcgctgccggtattgcttttacgaggatgaagccgccaaccgcacccaggccagcatgggcgtcatgtccctggagaccgccgaccttctcatcggcgaggccctggacgcggtggacttcaacggccgcctgagctttgccttccagggcggtgagcccacggtggcagggctggactttttccgccactttgtggaggaagtcacccgccgcaacacccgccatattccggtcaattactccatccagaccaacggcctggccctggacgaggaatgggcggagttcctggccaaaaaccgcttcctggtgggcatctccatggacggcgacaaagccctgcacgatgaattccgcatcgacgcggcgggcaagggcacctggacgcgggttcggcagaacgtcaccatgcttcagcgggccggggtggacctgaacctgctgtgcgtggtcaccaagcgctgcgccaagagcgcggtgcgggtctaccatgccctgcaaaagaccggcgtgaactttttgcagttcatcccctgcctggaccccctggaaatgccccggggcagcatgccctactcgctgctgccggaagattacggcaccttcctctgcgccctgtttgacgagtggtaccgggactggtcctccggtcattacaccagcgtgcgcctgtttgacgactacgtccaccttgccatgggcctgccggccggcacctgcgccaccagcggcagctgcggcgcctactttgtggtggaagccgacggctcggtctatccctgcgacttctacgtcctggacgagtggaagctgggccacctgggtgaccagcctctgcccgccctggcccagagcgaccgggcggtgcgattcctgcaggacggcctgaaccaccccaccgcctgtgcctcctgccagtggcggcagctctgcttcggcggctgcaagcgcgactggtgcgacgaccccgccgggggcaagcggaattactactgctcttctttccagcgctttttcgcccacgctgctccccgcctgtaccaggtcgcccaggcggagctgcgggctcgcgggcgctgaccgtctgatttcctgctgaacaaggaggtttccccatgcctttcattgacgcaaaactcaccgtatccgtcgccgacgcccagaaagaggccctcaagaccgctttcggcaaggccattcccaccctgcacaagaccgagacctacctgatggtgggcatccaggacaactacgacctgtggatggccgggaaaaagctggacaagggcgcttacctggcggtcagcctgtacggcagcgccgcccccgccgactacgacgccatgaccggcaagctctgcgatattctggaagagcagctgggcattccgggcagcagcgtctatgtcacctaccaccccgtcagcgactggggctggaacggcagcaatttctgacccgtattttccaaggccgcgcagttttgcgcggtcttttttctttgtccggccgcccgctttcaaaaacccttttctcacaaaataccgtatgatttttgaaaatcgcttgttgtttgttctccacacaaacacattcggaacaaaaacacggacattttttgtgattttctcttgcgcggcgggccatacggtggtaacatagaaactggcgtaagctaatagagcgcggcgcggtcccccgtatggggatggcgtgccgccagaaaagggagagtgtgttactatgtcgatcaagaacgcttatctggccggtgtgtatgagggtctggccaagcgcaacgccgagcagaaagagtttctgcaggcggtggacgaagttctggaaagcctggagccggtcatcgaggcccgccccgagctggaaaagaacggcctgatcgagcgcatcgttgagccggagcgcgtggtcatgttccgcgtgccctgggtggacgacaacggcaaggttcaggtgaaccgcggctaccgcgtccagttcaactcggccatcggcccctacaagggcggcctgcgcttccattccagcgtcaacctgtccgtcatcaagttcctgggcttcgagcaggtgttcaagaacagcctgaccggcctgcccatgggcggcggcaagggcggcagcgactttgacccccatggcaagagcgatgccgaggtcatgcgtttctgccagagctttatgactgagctgtaccgccacatcggccccgactgcgacgttcccgccggcgacatcggcgtgggcggccgtgagatcggctacctgttcggccagtacaagcgcatcaccaacagctttgtgggcgttctgaccggcaagggcatcccctacggcggcagccttgcccgtaccgaggccaccggctacggcctgtgctactacaccgacgaaatgctcaaggccaacggcaagagcttcgacggtgccaaggtcgtcgtctccggttccggcaacgtcgccacctacgccaaccagaaggcaacccagctgggcggcaaggtcatcgccatgagcgactccaacggctacatcgtggacgaaaacggcattgactacaaggtcatcaaggagatcaaggaagtcaagcgcgcccgcatcaagacctacctggactacgtgccttccgccaagtatgttgagggcagctccggcatctggaccgttccctgcgacatcgctctgccctgcgccactcagaacgagctggatctggacggcgccaaggctctggtcgccaacggctgctacgcagtcgccgagggcgccaacatgccttccactcccgacgcggtggcttacctgcaggccaacaaggtcctgtttgctcccgccaaggcttccaacgccggcggcgtcgccaccagcggcctggaaatgagccagaactcccagcgtctttcctggaccttcgacgaggtcgacggcaagctgcagggcatcatgaagaacatctacgccaacaccgctgccgctgccgaggcttacggcatgaagggcaacctggtcgctggcgccaacatcgccggcttcaacaaggtcgccgacgccatgctggctcagggcatcgtctgatcccttctgactgaaactccataaataacaaaccgccgctccgtgctgtaccggagcggcggtttttgtgttctttccggggttctgcccccaaaaatactctcagggcgcccggcctgacggccggacgccccgaaagcggtatctggaaaataagaggatggcattttcagtatgcgggcgcgcggggctgttccccgccgtacccgcaaagaccgtcccgatcagacgatctgctgcgacttgtgcacgccggtcttgaggaactccacccactcggccacgttgaccgcgtggtcgcccaggcgctcaagatacttggtgatcatgaacaggtccagggcggtggtggcatcctgagggttggcggcaatgtaggcggcgatctcgtcgctgatgcggctgaagaaagcgtcggccttgtcgtccttgcggatgaccttggcggcagcatccaggtccacctggacgtaagcgccgatggcatccttgaccatacggtgaaccaggtcgcccatctcgtagatgtcctccatgacgcccacggcatgggcgcggtcgatcttgaggtggagcacgatctcggcaatgtcggaagcctgatcggcgatgcgctcaatgtcggtgaccatcttgagggcggtggacaccttgcgcaggtcgctggccaccggctgctggcgcaggaaaagcgtcaggcagcggtgttcgatctcccgctccacggcgttgatctcgctgtcccgggcaacgacgctgcgcgccagctccacgtcgccctcccgcagtgcccgcagggcgctgccgatggcgccgcctgccgcatggcccatgcgtgccagcatggtatccagctcaagcagctctgcgtcgtagactttgcggctgctgtatcccataatgtaaaactcccttctgaatcagccgaaacggccggagatgtaatcctcggtacgcttgtcggaagggttggcaaacaggcgctcggtggagcccatctcgaccagctctcccagcaggaagaacgccgtcttgtccgagatacgggcggcctgctgcatgttgtgggtgacgatgacgatggtataatcctttttcaggtccatggccagctcctccacacgggaggtggagatggggtccagggcggaggtgggttcgtccatgagcaggacttccggctccacggccagggcgcgggcgatgcacagacgctgctgctgaccgccggacaggcccagcgccgactttttcagacggtccttgacctcgtcccagatggccgcgccgcgcagggatttctccacgatctcatccagctcggccttgccgtggatgccgtgggtgcgggggccgtaggcgatgttgtcgtagatgctcatggggaagggattgggcttctggaacaccatgcccacccgcttgcgcaggacgttgacgtccagcttgtccttgtagatgtccacgccgtccagcttgacgtcgccggtgatgcggcagccctccaccaggtcgttcatgcggttgagggtcttgaggaaggtggacttgccgcagccggaaggtccgatgaatgcggtgatctctttttcgggaatatccatgctgacgcccttcagtgcatggaaggcgccgtaatacaggttcaggtccttgacttcaaacttatccatcgttctgagttcctttcgtcaatgttctggcaatcaggctggagacggcattgatgaccagcaccagcaccagcaggaccactgcggtgccgaatgcctcgcccacatgcagaccctcgctggaaaggacgtacatatgcacggccagcgtacgggtggagtcaaacaggaaatccgcgcccgacgcgatcttggtggcggagccggcggtgtacagcagcgcggcggtctcgcccacgatacggccggtgcccaggatgacaccggacaggatgccgggcatggccgggggcagcacgatggcaaagacggtgcgcagcttgcccgcgcccaggccgaagctgccctcacggtaggaatccggcaccgccatgagggattcctcggtggtgcgcatgataaggggcaggatcatgatggccagcgtcagcgagccggacagaagggacaggccgaagtgcagctgggtgacaaagaacagcatgccgaacaggccgtacacgatggaggggatgccctgcagcgtctcggcggtcagacggaccaccttgaccagcttgctgccgcggggggcgtactccaccagatagatggccgcaaagacgcccagcggggtggcaaccagcagtgccagcaccgtcatcagcagggtgttgatgagggacggcataagggaaacgttgtcggagttgtaggtccactcaaacagggagggcttgaggttggggatgccccggaccagaatgtagcccaccaggaagatcaggataccggcggtgaacagcgcggccagacggaccagccagcgcatggccacggaaaagacccgggcgccggtacggttgcggtaggggtccttgccccggtgtccgcggttgagggcggtgggatggctggcggtcatgtcggagccggcggtcacccgtccgtttgcattgatactcagttcaggcatgttcttttcctcccttgaccatgctgaagcagaagttgatcagcagaataaagacgaacagcacaacgccggtggcgatcagcgcctcgcggtgcaggtcggcggcatagcccatttccatgacgatgttgctggtcatggtgcgcaggccctcaaacaggccctggggcatacggggctggttgcccgcgaccatgatgacagccatggtctcgccgatggaacggcccacacccaggatgacgccggacagcacgccggacttggcggcgggcagcaggatgcagaaaacgctgcgctcgtgggtggcgcccagggccagactgccttcgtagtagctctggggcaccgcgtcaagggaagttttggaaacggtgatgatggtgggcaggatcataatacccagcagcaggctggcggtgaacatgctcatgccgctgccgtcaaaggggtccgcgagctttgccacccagggcaccagcaccatgacgccgaagaaaccgtagacgacggagggaataccggccagcagctggatggcgggcatcagcagttttttggttttctggccggcaaagcgggagagatataccgccgtcagaattccgatgggcacgccgacgaccagggacccggccgtgacgtagatactgccgatgatcatggggaagatgccgtacacatccgcagagggtttccactcggttcccagcaggaagttgaggggtccgatctcaaagatggtgggcagaccgtttgcgaacaggaaaatacagatcagcgcaacagcgcagatggagacacacgcacatgccagaaacaggatccgcatggcggactctttccattttgacgttccgccggcctttaccacggcggtcgcagcattgttttccataccgatacctcgctaagtttgaacacacagatacgctttgccggatctttccggacacagcagaaccgggcggccccctaacccgtgatcgagaaagcggcgcgcgcccggcattttaatcgctgcagcccttgcgggcctgccgtttgtctggttactgaacgtcagcccaggtggtcagctcgccggtgtagacagcgcgcagattgtccatggtgatgttcgtgatggggttggcgttgttgacgacgaccgcgatgccgtccatggcgagcacggtagccacagcgccggcctcgacctcgctgtccttcagctcacggctggccatgccgatggtgtaggtgccgtccagagcaaagttgacgccgttggtggagtcagaggtctgcagctcgatggtggcattggggttgacctcggcgtaagcctcgatcagcttctccatgacaggagagacagaggaggaaccgccgaccacgatgctgccggaaggctgggtgctggtgtagctctcagcggcgtcgtcgccgatgtagccttcctcggtgatgatggtctggccctcagcggacatcacgtagctgatgaagtcctgagaaacctcgtccaggccggtgacgtcgccgttggtgacgatgttgaagggacgggcgatggtgtagctgccgttcttgacgttctcgacggtgggctcaacgccgtccaccgcgatgcccttgacggtctcgttcagagaacccagggagatgtagccgatggcgccttcctcggcggcaacggaggtcataacgttgttggtggagttggcctgctgggcgtcgacggtagtcatgtcgccctcgtcagtctcaacgccggtcagctcgatgaacgcgccgcgggtgccggagccatcctcacgggtaacgaccgagatcttctggctgttgtcgaagtcgctgccggtggattcctcggtagcggcagagctggaggtggaagcggagctgctctcttccgctgcggaagagctgctgtcggtgttgctgcaggcagccaggctcagagccatagccgcagcgcagatagtcgcaacgatacgtttcataagtaatttcttctcccttttttcgccgttgtacggctgttttgtgtagactcggcggccacccggccgcccctgttcctttcgctcggaacggttatattgtatcgcggcaaagtcccgttatcgaccatgtgccggtacaatcgatgtaaaaccgcggtaatccacagcctcaaagtgtaaagtccgtgcaaaatttgccccgccgggcgcacaggaattttacattttcccttccgcccccaacaaaaccggctctccgccttgcaacgggcgggccagtgtggtatattctataaagaatccggtcacgcgccggacagagcggaggggtaacaatgcatcacggtccgtatttgctgcggcagcatgatatggacgcattgtctatttcctttgctattgcaacggccacaggccctgcttttccgtttgtttcggatgcagggcttctttttttgtgccgtcgcccggcgtgcttccggaggagataaggtcaggaggtaattatctgtgagtgagaaatccaaaaacaccgcgcccatcgattactccaaaggtatttacgatgcgcgcacgctgggcacgccccgcgttctggtgctgggcatccagcatatgttcgccatgttcggcgcgacggtcctcgtcccgctgatcaccggtctgagcgtctccactaccctgctgtgcgcgggcctgggcacgcttctgttccacttcctctgcaaaggcaaggtccccgcattcctgggttcgtcctttgcctacctgggcggctttgccattgtggctcccatgctgcccgacgccaacggtgaggccaccatcgccaacaccgaaatgctgccctacgcctgcgcaggcgtggccttctcgggtcttttgtatgtgctggtcagcggcctgatctcggtgttcggcatccgccgcatcatgcggttcttcccgcccatcgtcaccggccccatcatcatctccatcggcctgatcctggcccccagcgccatctccaactgccagaccaactggctgctggccatcgtggctctgggcgtcgtcatcgtctgcaacatctggggcaagggcatgatcaagattttgcccatcctgctgggcgtcatcgcgtcctatatcgtcgccctcgtcaccggccagatcgacttcactgccatttcttcggccagctggttcggcttccccatcaaggcggaggccaccggtctgcttgccattgacggcagccccgagttcatcagcgccctgttcaccatcatgcccatcgccctggcgaccatgatggagcacatcggcgacattgccgccatcagcgccaccaccggcaagaactacatccgcgaccccggcatcaaccgcaccctgctgggtgacggcctggccaccaccatggccggcctgctgggcggccccgccaacaccacctacggcgagaacaccggcgttctggccctgaccaagatctacgatcccctggtcatccgcctggctgcctgcttcgccatcctgctcagcttctgccccaagtttgaggccatcatcaacaccattcccgcaggcatcatcggcggcatcagcttcgtgctgtacggcatgatctccgccatcggtgtccgcaacgtggtggagaacaaggtcgacctgaccaactcccgcaacctcatcattgcggctgtcatcctggtcagcgccctgggcttcaactctctgggcggcctgtccttcgtggtcctgggcgttaccgtcaacctgtccggcctggccattgccgccatcctgggcatcctgctcaacgccatcctgcccggcaatgactacgagttcgacgacggcgacggcaccggcgagggcgccagcctccgcatctgaccgccccccaaacgcaaaccaaaaggcctcccggcttgtggacttctgtcccggccgggaggcctttctttctataataatgtatgctgtcggggtcctcacttgcggcaggccgcgtcgatgcaccccagcgcgttgagggtccgggggaacccgatgaagggcaggcactgggtcaccgcgtcgatgagcagctcccgcccgttgccgatgcccaggttggccccggcatggctggtggcctggggttcgcatccgcccaggcagcagatggcgcagaaggtgatgagctcccgggtgggcagatccagcccgctccgggtgtagaaatccccgaaacagtgggccgacagatagtcctgcatgtgccgcagttcctccggggcggcggcgcgcatcctgtcgatgttctccaccccgaacagctgccgctgcaccgccagtcccttttcaaagcggtcgttttcggtgacgagggtgttggacgccgcgtcgccgtccgcccggaacagcaccggggacgccgcctccagggcgcagagcgcccgctccagccccacgtagggggcgcactggtagatggtctcccgcaactgttccgccgtggcgcccatcttcatcccggccaggagatactgctccatatgggtcagggactgggtggccgtcagcgccgccaccgtcaccagtgcccgctgaacgtcggtcagacagccccgggccgacacatcccccagcaggaaattcttggcgatctgttcaaactccgggtccagcccgcagccgtggaaggcctctcctgcaaaccaggcattgtccttttcgtgcgccgtttcactccgtgtcatatacaagcactctcctttgctttctgcgcggttccgtaaaaagacaacgccccgaacctctgactgcaaaacatcatttgccgctttatcgtgccttgcgttccacacaagagcgcttcgcccctctgccctgggtccgccgcagcgcagcggtttcccatgcttcgcagtccttgcgggccttcgttttcttatgtcactcgcggttgccgccgtttttctgtctttattgtaccgccctgccccgcccttgtaaaatacctgctttccatgcccggtcatgcgcaaaaggcatggcttgctttgacacccgcctgttcggcatttataataaggacagaactcccgtcagagaaaggggcattcccatggaattgcgggtcttacaatattttctggccgtcgcccgggaggagagcatcacccgcgcggcggaatccctccacatcacccagcccaccctcagccgccagctttcccagttggaggaggagctgggcacccgcctgtttgagcgcggcacccggcacatcaccctgacgccggacggccttttgctgcgccgccgggcggaggagatctccgagctggtggacaagacccggcaggagctggcctttcaggacgagacgctggccggtaccgtagccctgggcagcggcgagctggaagccgtccgggtcatgccccggctgtttcaggccttccgcatgcgctacccgctggtagactatacgctgtacagcggcacggcggacgacgtcaaggagcggatggaccggggcctgctggacgcgggcattttgctggaaccggtggacgtggaaaaatacgagttcatccgcctgccggtgcgggaacagtggatcgccctcatgcccgccgacgatcctctggccgccaaatccgccgtcacggtggacgacctggccgggcgccccctgctgctgccccagcgcccccgggtcctcagcgaggtcgccagctggttcggggaccgctgcggcgacctggatgtcccctttacctgcaacatgagcaccaacgccgccgtgctggtggccggcggcatgggcatcgccgtcaccatcgagggttccctgccgtttctggacaccaccaaactctgcacccggccgctggacccgcccatgaccacctccaccgtgttcgcctggaagcggcatcagcccttcggccctgccgccgccaagttcctggaattcgcccgcaccttctgggcggagttcccgccccagggctgaccgaccttttcccataaaaataacccgcccggacgatgtcacatcccatcgtccgggcgggttttgttgttttgtcagtcggtttccccggtgcgctctccggggacagggctgcgctgggggccggtggcatacaccgcgcagatcaggccgcacaggcccaccgcgcccagaccgcaggactccaccagttccagcaggtccgccgtgccgcccacaaaagccagtaccgtctggggcagttccccgcaggtgcagaacagaaaagccagcatcccgtaaaagaacagtcccttgccgaacgccgccgtgggcagaaagatcaccttcagcagggcattcaccgcgcacagggccgcgacggcggacagcaccgcaaagatatgggtggtccgcgtcaccgaggccggttccatggcaaagcgctccaccgtcagccacagcggcccggccagcatgggcaggcccagcaccgcgggcaggggctttttgggcggcgccagaaaggcctgcaacccgaacaggatcatccacccgccgctcaccgcctccagaatgccccggggcatgaccagcgctccgctgcggaccaaaatcgtgctgacgccggtctccagcatcagaccgccggccagcagcatcccgatacccagccatgccttgccccggaccatggccgccgggcggggctgggcgcaccgggacagcaaatacagcaccaccgcgccggccaacgccgcaagataccggtaccaggcctcccccaccaggggaaatccggtagaagtttcggtccagcggaccagatccacggcgcgcacggcgcccagcgccaggcaaaagaccgccgcggccaccgccgcaatacgtttgttcatggtttcctcccaccgccggggccggacaaaagacccgcggcatatttgcggccgatgccgcatacattggtagcaaaggggacacgccccgccgcctgtttcactcgcttcggaggccgccgcccgccacaggggcagcttccgggtttgttttactattttacccgtgcaggcggcaaattgcaataccggcctgtcccggagggtatcatgaaaaccgctgtcaaacgcaccgttctctgtgcggtcctgctgctgatcctggccgcggccgcgccgtttttgtgcctgcttcccttttttgccccgggggataccggcgattccccctcgcccactgcccttcccgatgtctccgcccaagaggatgaggacaccacccccgacacgccccgggccgagccccaggccattctggtgtgggacgatgccgcgggggaggccgtcagcgtccccgccctggagtacctcatcggggccgccgcctgtgaaatgccccccgactggccggacgacgccctgatggcccagatggtggccagccacagctgggcgctctatcagctggagcatagcgaccagaaggacgcggccatcaccgtcaacagcgcccagtgcagcggctggaccaccgaggaagtcctgcgcagccgctggggggaggattttgagtcccgctggcagcattttacccagctggcggaggaagtgctgtatgacctggtgctgtacgacgacgctcccgccgccacctgctaccatgccatcagcgccgggcatacccaggccagccagcgggtctgggtagagtctctgccttatttacagggggtggattcctcctgggacaagaccgccgacgactttgaagtcaccgtccagtacgacgcccagcaggtctccgacgccatgtatgcttaccttggcatcgacgtcaccggcaacccggacacctggatcggtgagaccgtctgggacgatgcgggctacgtggacaccatccaggtctgcggccagagcgtcaccggcccccagatgcgctccgccctgagcctgcgctccgcctgctttgccattgcctggcaggacggggagttcaccgtcaccacccggggttacggccacggcgtgggcctgagccaggagggcgcccgggccatggcgacggggggagcctcctggcaggatattctggactactacttccccggcacccggctgggtaccaccgacgacctgctctgacgcccctttacacttgacaaccttccccgcacggactaccattaattttatgactttataataaggtgtggatggataggatgttcaaaggacaggtctccctgaccgaaggcagtgtcgccaaggggatgctggtatttgcaattcccatttttttcagcaatctgtttcagcagctgtacaacgcggtggactccctcatcgtgggcaactttctgggcggcaacgccctggcggcggtgggttcctccggcagcctgatttttctgctcaccggctttgtcaacggtgtcagcctgggcgcgggcgtgctcattgcccgccactacggtgccaaggactcggaagccctgaagcggacggtgcacaccaccgtggccctgggcctggcggccagtgtggtgttgacggtgctgggcgtggtgctgaccccgcagatcctgcgctggatgggtaccccggacgacgttttcgtcaattctgtggtgtatttccgggtctacttcctgggttccacggcggtggtgctgtataacattggcgccagcatcctgcaatcggtgggcgacagccgcagccccatgtattatcttattgcggcatccctgctcaatgtggtgctggacctgttgttcatcggtgtctttcacttcggggtaggcgccgccgccttggccaccatcatctcccaggcggccagcgcgttcctggctttccgcaagctcaccctctcccccgaggcctacggcgtccgctggaagcaggtccgcttccacccggccaccctgcgggcggtgatcgcccagggtgttccctccggcgtgcagaactcggtcatttccctggccaacgtcattgtccaggccaatatcaactccttcggcgcacaggccatggccggctgcggcgcttacagcaagatcgaaggctttgcctttttgcccgtgacctgcttttccatggctctggccacctttgtcagccagaacatcggcgcggccaagctggaccgtgtgcgcaagggcatgcgcttcggcctggtgacttcccccctgctggcggaagccatcggccttgccatctttgccctggcccccctgctcatcgccgctttcaacggggaaccggacgttatcgccttcggtgtccggcaagcccgcacggtgtcgctgttctactgcctgctggccttcagccattgctgtgccggcatcctgcgcggcctgggccgccccactgttcccatggtggtcatgctggcggtctggtgcgccctgcgtatcacctacatcaccgtggtcctgcgcctgatccccgacatcggcgtcatcttctgggcctatcccctgacctggagcatcagctccatcctgtttgcctggtacctggctcactgccccctgccctcccccggcggcggtgctcccacccggggcaacctgcactgaccgcctgtaaaacagcagccaaaagcaatacatttcagaatgcagcgcccatatattacgctttgtattatataggcgctgtatttttctttgtttctctttttctgatttcgtctgtttttctctttttccgttcccgtatttcccaacgcagaattaacagccccgccattcccctattttgtcatcccattcctccctcctgacggcttgccgccgactgccacatctgccgctcccgccgcgcctgctgcctcagttctccgctccctgcttccccgccccggcgcacacctctttcccaaaagcccgcacccgggacccccccaccggctcatatcacagcttcctcccgacgcaaaagcagccccgcctgttggcggggctgcttttgtgtattattcaggagacgatcgatcagttgaggatggtcagctcggtctcgggatcgaacaggtggatcttgttggaatccagagcaacggtgaccttgtcgccgcggcgagccttggaggtgggagcaacgcgagccatcatgttctggcccttgtaggtcaggtacaggtagatctcagcgcccatcagctcggagacttcgacctcagcctgcagctgggtgtcggggtgcttggccaggaattcctcgtcgtccttcatatcctcgggacggatgccgaccttgagggtcttgccgacgtaagcgtccagcttgccgtccttggtcttttcagcgggcagaggcagcttggtgccggccaggtcgacggtataggtggtgccgttcttctccagggtgccgtccatgaagttcatctgggggctgccgatgaagccggcaacgaagatgttgcaggggtaatcgtacaggttctgcggggtatcgacctgctggatgacgccgtccttcataacgacgatgcggtcgcccatggtcatggcctcggtctggtcatgggtaacgtagatgaaggtggtagccaggcgcttgtgcagcttgatgatctcggtacgcatgctggtacggagcttggcgtccaggttggacagaggctcgtcgagcaggaagaccgccgggttacggaccatggcgcggcccagggcaacgcgctgacgctggccgccggacagagccttgggcttacggtcaagcaggtgctcgatctccaggatcttggcagcctcgcggacgcgcttgtcgatctcgtccttgggcatcttgcgcagttccaggccgaaagccatgttcttgtaaacggtcatatgggggtacagcgcgtagttctggaacaccatcgcgatgtcacgatccttcgggggaacgtcgttgatcaggcgatcgccgatgtacatttcgcccttggagatttcctccagaccggcgaccatacgcagggtggtggacttgccgcagccggaaggaccgacgaaaacgacgaactccttgtcctggatctccaggttgaagtccttgacggcggtgacgttgcccgggtagatcttgtagatgtgacggcagctgatactggccattgcgatgtacctccattgcaatttgttgataccctttcgggtcgttttctcttgacaagtctataataacagcttattctaagaaaagatatagcactttattgatatggaggaccagaaattgatttttgactggaatcgctgctgcgccgtggcggaggtgcgggagctgaccggcagcgaccccgccgccctgccggggccggggctgtgggcgggcatcctgtccagcggccgctgccgggcggagggtcccggcggccacgatgcggcgggcgcctcgggggacctgctgctctgcggcggcactgtcaccctgctgcccctggaggactgccacctgctggcggtgcgcctcaccggcctggcggcggaggagttctccgccaacctgggccgtccccgctttgcagacggcgccctatgccccggggcggcggaactgctggcccgcctgtgcgacgcccaccctgcggataccgccgaacaaagccagcgggcctatgccctgctgtgcgagctttcccatgccgacgaggccggccgccgtctcagcccccttgtggcggaggcggtggccgccatccgggacaactacatcggcctgtacggcgtggaggagctcagccgtcagctgggcgtctccaaatgccacctggtgcggaccttctcggcggagatgggcgtctctcccggcaagtacctcaccaccacccgcatcgaagccgccaagctgctgctcctggaacgggagtacagcctggacatgatcgccgccctgtgcggattttccagcgccaactacctctgccgggtgttcaagcgggagaccggccagacccccgcggcctggcgggattccaacgcccccggccccgccgtgcgcctgccctcccgctccaacgagatctatctctgatctgtccccaaaatgcacaaagcggccccggcccatcccctgcgggatgtgccggagccgcttatttgtttgtgtcgcgggcggtgggaccgccgcagcgccgttaccagagcaggaccatgagcaggacgatgagtcccaggcccacgatatatacggcgccgatcatcagccccgccttcaatgcccccagcgctgcccagagccgttgttttccatccagctcgtcgggctgctcccagggccgccgactggtctcgggcttgtcctggggcgcgttgtcgcgttcaagctgccgcggcttgcgcggcagaaagggggacggcaggtcgatgccgctcatatcgacgatggtgcgtccatcgtcctcgaagggttcgcgttttttcatttgtcaaacagatggcagaccacgtaatgtccgggttcgacctcacgctggacgggagcttcctccttgcagcgctgggtgcagtacttgcagcgggtgtggaacttgcagcccttgggcgggtttgccggggagggcaacgtaccttccagcacgatgcgctcgcgcttgacggtggggtcgggaatgggaatggccgagaacagcgccttggtgtaggggtgcagcgggttgcggaagatgtcctccgtctcgccgtactccaccaggttgcccaggtacatgacgcccaccgtgtcggagatgtgctcaacgacggacaggtcgtgggagatgaacaggtaggtcaggttgtactgatcctgcagatctttcagcaggttgatgatctgcgcctgaatggacacgtccagagcggagaccggctcatcgcagacgacgaactcggggttcagcgccagggcgcgggcgatgcagatacgctgacgctggccgccggagaactcgtggggatagcggtccttgtggaagggctgcaggccgcactggtccatgatcttgtcgatatagtcgttgaactccgccttgggcaccagattgtgctcacggacggcctcgccgatgatctcaccgacgggcagacgaggcgacaggctggagaaggggtcctggaagatgatctgcatcttgggacgcagggcgcgcatggccttggcatccaggtcgtagacttcctggccgttgaacaggacctggccgccggtcttttcaccggacaggcgcaggatggtgcggccggtggtggacttgccgcagccggactcgccgaccagacccatggtgcagccgcggcgcaggttgaaggtaacgccgtccacagccttgacctggcccacggtgcggctgaccagtccgcccttgatggggaagtatttcttgaggttgttgaccatcaggatatactgcgggtcataggtgaccggggtgtaatccagctgatccgcagcgggggtctttgccttggtatttttggtgctcatttattctgcccccttcttgtcatagtaacgatagcagctgactttgtgggtgggcgacaggctgatctcgcagggatacgcgccgtcgcagccttccacgcacatttcgcagcggtccttgaaatagcagtagttgggcatgtcgatggggttggggaccttgccggggatagagtacagcttgtccacctgcttgcccaccacaggtttggaggccatcaggccgatggtgtaggggtgagcgggatgggcgaagatctcctcaacggtgcccttttccaccacgcggccggcgtacatgacgaccacatagtcggcagtctcggcgataacgcccaggtcatgggtgatgagcatgatggaagagttgatgcggtctttcaggctgcgcagcaggtccaggatctgggcctggatggtcacgtccagagcggtggtcggctcgtccgcaatgatgatgcgggggttgcaggccagagccatggcgatcatgacacgctggcgcataccgccggacagctcatggggatacatgctgtagacgccctcgctgttggcaatgccgacggtcttgagcatctcgatggtgcgggccttgatctcatccttggtcttgccctcgccctcgtgcagggcgataacctcgtccacctgctggccgatgcggaacaccgggttcaggctggtcatgggctcctggaagatcatggagatgtagttgccgcgcaggcgctgcatcttctcggcggggatcttggcaatgtcgtaggccttgccgtcgcccacattcaggcggatctcgccctccaccacctggccctggggacgctgcagcaactgcatcagggacaggctggtgaccgacttgccgcagccggactcacccacgacgcccacggtcttgccgatgggcacttcaaaggtaacgccgtccacgctcttgacggtaccggcgtcggtgaagaagtaggtgtgcaggttatcaaattccaccgcatttttggggtcatgcatctgggtggtgtattccgactcaggcacgttcttgcgcttgcgctgcttttccatgcggtcggtgatgcggcggttctccttggagatacgccgggattcttttgcggagagatatccttcgctgtgtttcttagccatgattcgtcgccctcctttatcgcttcatcttggggtcaaaggcatcgcgcagaccatcgcccacaaagttgaagccaaggaccgtgatcagcaggcagacgccggccgggatccaaatgaaccagtagttggtcatgacgtaggcgttgttgacgtcgttcatgatgttgccccaggaagcaaaggggaacttgacgcccagacccaggaaggacagcgtcgcctcggtgatgatggtggaaccaagcatcatggtgcaggtgacgatgagctgagggatgacattggggatcaggtgacggaaaatgcggtgccaggtgcggatgccgcaggcctcggtggcggtcatgaactcctgctcacgcagggagaggatctggccgcggaccagacgggcgatggagggccagctcaggaagcccaggatcagcatgaggtagagcatacggatcatggggtcgatgcgcatggcgtccatggcagagcccaggatgatgatgacgggagtggacgggatgcagtagaacacgtccacgatacgcatgatgaggttgtcgacccatttgccgaagtagccggccaggccgcccatcaggacgcccagcacgccggcgatgccgacgacgatgaagccgatgaccagggagacacggccgccgtacatcagacgggtcagcatgtccatgccgttggtgtcggtgcccagccagtgcttcagggaggggctggagtaacggtcgtagacctgggtctcggtcatctgcttgaccgaccagctggaggtgtaggcgtcgtaggagatgatatactcggcctcggtgccgtcctcactggtgtagacaaagtcctcggcgttgtcgctgatggcttcttccagcttttccttgaagtcgcgggtcacgaccacggtgctgtcggcggaagacacgatgaagcggctgatgtagcccagctcggtgccgccttccagcaggttgccgtcctcgtccatggtgtaggcagtgccgtccacctcgaactcggtctcgccgttgacgtaggcacgcagtgccgccagacggatctccagcgaaggcacgctgccgctgtcgggcgcgttgaagatatccttggctgccacgaccaccagggtgtcaccctgatagacgctgtacaggtcctcaccctcattgacgacggtgtaggtcacgtccttgtaggtgaagctctcttccccggcgttgatggccttgagcagttcgctctgggccagagcgccgaagtcctggccctccgccacgctgtaacggtagctggagttgacggtcacgccaacgtattcacgctccagggtgttgatggtgaagaactgctcgtcctgaccgtaggggctgatcacgccgccgacgaaggagaacacgaacatggcgaccagcatggccaggccgataacagccagacggttgcggaaaaaccgctttgcgaccagcgcacccggcgaaaggaccttgacgcggcggtcatcgttgagggaataatgctccggctcatttccggccggggtgtttttgatggcttcgctcacagtaaatcgctcctttcgttaagagatgcgcacgcgggggtcgaccacggcgtacagaatgtcggaaaggaggttgctggccagagtcaaaaccgcgataaaagtcagatagaacatggtgaagggaatgtcgcccgcgaccatggactggtaggagttgtagccgatgcccggcagagagaacagcgtctcggtgatgagggcgccggagaacaggcccggcagagagccgccgatgatggtgaccagggggatcagcgtgttgcggaaagcatgcttgtagatgacggtatgctccgacaggcccttggcgcgggcggtgcggatatagtcagcattgagcacttccagcatattggtgcgggtgtagcgcatcagcgaaccgacggacacgatgaccagggtcgcgatcggcaggaccaggtggtttgccttgtccaggaactgacccatggcatccagctgggcgtagtcacgtcccaccaggccgtacaggtcgaaccagcccagcttgacggaaaagaccagcttgagcagggtggcgaagaagaaggtcggcagagagataccgaccagagcgccggcggtgatggcgtagtctgcgcgggagtactgcttggtcgccgcaatgacacccagagggatggcgatgatgagctccagcacaaaggcgatgatgcccatgacggcggacaggccgatgctggacttgaactcctccacaacggggacgttccacttccagctgtcaccgaactgaccggtgacgaactcgcccagccacttcaggtagccggggacgatgcccagatccaggccgtaggaggcattgagctgtgcgatccattcctcgtagggctttgcgccgggtgcctgggcaagctgcatggccatcgtctcaacaaaggacgcgggcaggctgcgcatgagcacgtacagcacaaaggtgacgcagaacaagatcaggatcgacagaaggatacgtttaatgatgtagtttcgcacgggggtcccttcccttcctatgggtgcgcgtgggacgcgcaccttttgtaatatggatatccctctccaccggcagcgcggtgtctgccggtggaatgggatagccacattaacttcctaactatcagtaactgccgaagcaacggccccgggccgctccgcgccgccaaaacgacgcagagcggtcctttttctgccgtaacttccgcctgccaggcacggggcaaacgcccctgccggcacagcacaagtaaccgccccaatgttttgttgcaaacacagggcggtcacttgctttttcaagcggttataacaacccgcttccggctgctaaaaacgatatggatgttttttgccggaaaactcggccggtgatcaggccagagcgatgttctgaacttcgctgatccaggtccagtacggggtcatatcctgcgggatggtgctggtatcaacgcgctcgctggagaacagggtgcactcgctgcgctgatagacgggcagctcaacgccccaatccaggatgatctccatcgcttccttgtacatggcgcgacgggactcaacgtcggtggtagcacgggcagcctcgatcagagcatccaggtcagcatcgttgatgcagtagttgttggtggaaccctggctgtgatacagctggtacatatccgggtcgggagtggcctgccaggcagcgcaccacatctcagcctcaccggactggtaagaagcgtacagatcggcagcgttggccaggtcgttgacggtcagggtgaagccgatggtggacagagccttggaagcattggtcaggaccaggaaggtcgggtgatcgccgttgccgccgccgccgatgttgcaggtgtactccatcttggcgcctgcgggagcagcagtgatcttgccgtcggtgacggtgtagccggcagcctcaaagtagcccagagcagcctgcagagcagcagcgtagcggtcgtcggcgctcatgctgtcggtgtagatggggttgccgtccacgtcgacagagtaggccacacggtagccgtcgtcggtgacggtgggagcagcccaggaggtgtcggagatggggtagttgatgatggacgcggtgttgccgtagtaggaggtgatgccctcgtcacggtaagcagcgatcacggtagcaatagccttgcgcaggttcttggaagcctcggaagagggatcaccgccgacgttgaccttgttggcgctgatgccgatgtagccgtagcccaggaagtccttcagacgggtggtgatgacgctgccatccaggctgtcgtcgccgccgttgatctgagcgatctggtcagcgatttccagagagtagtcggggttggagatatccagggtgccggcctgaacaccggtgaccttatcggcctcctgggtctcgatgacgttcagatggggagccttgggagcgcccaggaagtagccctcgttggcatccaggtaaacaacaccgtcggtgtagttgttgaaggtgaaggggccagcgcccatggggctgccggtgacagagcggatcttgctcaggtcgcccttggtgaagccgaaggagttgttctcataatcgtacaggctctcgtcgccgtagtagtgcagaggagcgacggggatctgcagctggtagatcatggagttggacagctcggtggtggtgatggtcatgctgtaatcgccggtcttgacgatgccgctgatgttggcagcggaagtaccggtggtgacgccctcagagcccatgttgtagacttcctcggggatcaggtcggacagcgcggaaccggcggtctcagcctccatctggctgaagttccagttgtagtttgctgcgatggccaggaagaagtccttggcggtagcatcggcagccaggccgtcgtaagcccagttggcagcagcggtagcaacgtcgttgctgtcggcagccagaccgttggcgacgcagtagtcaacgatctcctgagcgaacttgacgccgccgtcgttgacagcgttccagaaagcggtctgctcttcttcagtccacaggctgaagtcggtgttgtcctcaccggcggcgccgatcagggcagccttggtggacataccgctgcggtattcctcaacaccggcgatgggcatgctgtacagggtcacggaaccgtcgtaggtcgggtccatgaagacgtacaggctgaagatgacgtcgtcgatggtgacaggctcgccatcagagaacttcaggtcatcacgcatggtgatgtcgtaggtaacggtgccgtcagcattctgggtaacgacgcagtcagcgggaccgtagtaggtgtaatcggtgccgttgtactccttggtctcaccctcgatgccgttgaggatcatctcgccgttgcggtcaggctggaacaggacgagctgagtcaggctgacaatgttgttgtccgcggaagaagcggcaaagaagggcgagaacttaccctccaggccagtttcggacgcgaccagagtgttgctgctgccggtggtttcggcagtggcggaggattcgccggtggcggtggaaccggagctcgcatccttggagcagccggccagcacacccacgctcatcgcagccgcggtcagcaaggcaagtgtctgttttacctttttcatgatgtggtcaataacctccctttcatctctcggtcaggtttccttgttgctgcgcagctgcgcagcaacagaaaaggacatgtccttttccggtgcaaatgccctcaatgttccctcattgcggacacttgtttcccggccgattttaatattatatattacagtttcccgcaatgtcaatgtttgcagaggttttcctccctgctttccctatttttcacaacttttcagtaggatttccatgcatagggtagaatccgcatccggtcactgtttttcattcgtggacatttgaccttcattgccgcactcccacgaaaaagctcccaaaaaccgccgcaaagcgacctgtacgccagtggcggtcaccgccagcaggataaagacaactctctgccagcttgccccgttgagcaggatatgcaccagacccataagggctgccgccgccgaaaacacggcggtgagcatgctgcgcatgggcagtttggccaccgacgcttcatacacgtactcccgcagagggtctcccccggcggtcaggcggcccagtgcccagcagaccgagacattggccacaaaggccgccacatagggcagcagcacatagaagcagcgtcccaggccctgtccgtccaggcatcccgccgccagaagcagcacctgggccacagccgcaccggcccacaaaaggcccagcacccgctgccggggcagcgtgccgcggtaatggtacatttttccgcggtaatggtagcgtccggtcaggtcccgctcaaagtcgttgagataggcgcggccgccgcgctttttcttgtccttgtccattacagaattcccgtcaggtcatagttgtccagccagcggccggcttcctcgcagacgccgcgcaggcagctttcctcaaagggattgtccagcccggcgtttttcagcagttcggtaaagacggcggtaccgccctgacgggtgtacgccatatagtgtgcccaggcatccttgggatctttctggatgcgcgcccagaactgcagcgacactgtctgcgccaggcagtagtcgatgtagtagaaggggctggagtagatgtgatgctgacgctgccagccctggccctcactgtagaaggggatctcaccgtccaggcgcatccagggcatgtagacgcccagcagttccttccagacggcgtgacgctccgccggggtcatgtcgggcttctcgtagacgatgtgctggaagtgatccaccatggtaccgtaggggatgaaggtcagtgccccggccaggtgggtgtagcggaacttgcgggcatccttgccgaagaagccctcagcccagggccaggcgaagaactccatggacatggagtggacctcgcaggcttccagggaaggccagacatactgcatggggatgcggtcgcggttggtgtaggcggcaaaggcatggccggcctcgtgggtgaccacctccacgtcgtgctgggtgccgttgaagttggcgaagatgaaaggcacgcggtagtcggcgatggaggtgcagtaaccgccgctctccttgcccggggtggacagcacgtccagcagcttgccgtccagcatggtgttgaagaactcactggtctcgggggacagttcatcgtagaagcgcttgccctgggccaggatggcgtcggcgtcgcccgccgggcgggggttgccggaacggaaggccagggcctcgtcggcaaagctcagggggtactgcacgcccagccgctgggcctgggcgcggtagatgcggtcggccaggggcaccaggtacttgaccacggcggcgcggaacttttcaatgtcctccttggtgtagcagttgcgctgcatgcgggcatagcccagggtggtgtagccgtcatagcctagcttgcgtcccatggcgtcacggagatggaccagcttgtcgtagatgtcgtccatggcgggctggttttccttgtaccagcggccctcggcctgccatgcggccagacggcgggcgtcgtcggcgtcggtcttgaagggagacagctgggacagggtgtagacaccgccctcaaaggggatctgggcgctggccagcagcttttcgtattcctgggtcaggtcgttttcctgctgcatctcggggacgatctcgggggagaaagccttgcgggccagctcggcgttgacgaacatcagggtgccgtattccttctcaaagtcggggcggaagggagattccagcatagcctgggtgaaggcatcccggcaggtctcgatctcggggatggcggcgttccagaacttcttctccgcgttgtagaactcgtcccgggtgtcgatgctgtggcggacgctggccagagtggcctgggtgtcgatgtgcttttccagcgtctccttgtccaggaaggcagcgcgggcggcagcatagtccccggcggcggacagacggcgggtcagctcgttgtattgttctttcagcgccgccaggtcggggcgctcataggacatttcggaaaaagtcatatagggttctcctttgcttgcaaatcatttaagtaacagtataccacagtcgtcaaagccggtgcagtcttaaatggaaagatctttccgggcaaagatacccacggccagagcatagagcaccgcgcctgccgccagcagcaccgccgcaccggtccaggccgcgctctcccccgccgcaatgccggagggatcaaacagggtgaaaaaggtgaaatatttggccacctcggcgtcgccgcccacattggccagcatgttgatgacataggccagggccgggatgcccgcgccgaagccgatgctgtaccttgtgtcggaaaagaggcaggacgccagcaggcagatgccgccgatgaaaaactgcaggcagaacagcgccccgttgacccgcagcaggtccgcggcggcgacctcaccggggaacatggcggccacgctgaccagttccaccgccgtggcatagcccagcaggatcacggtccccgagaccagcaccgccgcctgggtcagggccacggtggtgcgccgcaccggcgcggcgatgagggcagccatggaaccctcgtccacatatttggccaccaggccgttgccccgcaaaatggcaaagaccatggggaagatgagcagaataaagccgtacagataggagatcataaactccagcagattgttggctccgctgtccatgcccacggcggccatcagttccggcatcagctccacaaagccgtccagcgtggccatgagttccgggtcgtacatgctgatgatgatggtgacgtacatggtgatgactgcggcaagcaccgccagcagccgcaggctgcctttcatgccgcgcaggtaaagggtggtgttaatcatgttcgccgcctccgtaataatgcaggaaaatttcttccaggctctgttttgccgtgacggcgacccggcagccgtcctgctgcccgccgaaatcccgggcaaaggcctcggcctgggcgggcgtgtccagggtgacggtatagctgcgcagatgacgcttgcgcagggcctccaccgagtccaccgccgccagccgtcccgcccggatgatgcccacccggtggcaggtgcgttccacctcttcaaacatatggctggacagcaggatggtcttgccccgggcggtctcttcccgcagcagttcaatgaaccggttctgcatcagggggtccaggccgctggtgggctcgtccaggatcaggacgccggggtcgtgctggaacgccgctacgatgcccagcttctgcttcatgcccttgctcatctttttgatgccgccccgggggtccagctcaaaccggtccagcagttccttgcgccggacaggctcctgcccccggtaccgggaggaaaaccgcaggaattccatccccgtcatgtcgttgaaaaagctgttctccccggggatgtaccccaggtcccgctggatgttctcccgctctttccagcagtccatgccgcccacggtgcagctgcccgccctggggcgcaaaaatcccatgaggtgacggatggtcgttgtcttgcccgcgccgttggggccaagaaagccgaacgtttcccccttttccaccgaaaaactcaggtcgaacacgccttttcctccgccgtaatcccgtgtcaggcctttgatctctatcgcatccatcacgacgcctccttttccgcggccctgtccccaaagccgctgtctgggcacaatataacacccgccccctgccccgtcaagccggatgtgccgggcaggctgtttcccttggattttttcagtttttccccggatttcggccacttgggagcgattttgctgcatctttgcaacattttgggggtattgtgcacaagataggaaagaatttggtttttcccggcgtttttcatttatggaagggaccggttctccggctccttccgcactttctgttccgcccgttccctcattcttataataacaggaggtcctccgccgtgcccgccgccgtccctgtccttgaacgccccgccgcccctgccgcccgcagcagccgtatccccgcacctctgccctgggtcctgatcggggcctgttttgtggtctacctggccgtcatcaccctgtcaggggcttccctgctcggggcgatgcgcttttttctggctgcggcctgctatctcatcctgcccggctggctgctggcccggcggttcggcccccatgcccccggccttgccccgcttctgacggcggtgtacggctgcgccctgaccgcagtgttgttctgtgccgccgtccgtctgggggcgggatggctcttccgcctgggtccgcccctggccgtggtgatactggctttgtgggaatggcacgctcccgcccgagatgccgcacccctcttccgccgccccaaattttccggcctgcccgccgccctgccgctgctggcggtgttctggggcgtgctctgcgtcttttttgccctgtccttcggcgcccgcaacgcccacccgctggcggcgggcagcgtggttctggacaaagaccttttgtggaacatcggcaatgccgaggccttctgcgatgccttcccgccccaggacatccggttttccggggtgaggttttcctatcactatctgaccgaactgctggccgccgccctggccaccgccgccggggtcccctgttatgatgtgttcaccttcttttcggggccgctgtttttgctggccgagctggccgccctctacgccctggggctggtgttctatcagggccatgagaaaaaggcggcggtgctgcccgttctgctgttcggctttcaatccgtctcgatgtggaaaacctgggccaccggcgacggcattttcggcaacaccctgctgcgccacctgaccaccaacatcaacgcccaggccacggcccttgtgtttttcgcggctttcctggggctgttcaccctgatctcccggcagaaatttgccgcaggtcctgcctggtgggtcgcctatttcctgacctttgcccttttcaccctggccaaaggcccccaagcgggcattgccctctgcgccatggcggtggccatggtctttgtgctgatcttccagcggcccaagtacggccgggcgctgctctgcctggcaggcaccgccgccgtctttgcagggatgtaccggctgctctactccgccggggccaacaccagcatgatcttttccatctttgccatggaaaagacccgcgcctaccagtggctctcccctctcaccgactggctctgcgcccatctgcccatttccggctatgtgtggctggtgggcatcggcattgcggacgctttcctcatgatgcccttccagttcgtgctgtggctgcgggcagtccccggtgccctgcgtcacctgcccaaactggacccggcccacacgctgctccatgctggaacggtgggcggatttctggcctatcacattttctggcatgaaagttccagccaggtctactttgccctgttcgcaatgatctgcatgacgctgctggccgtggagcagctgcccaggctgcgcaaattcggtctgatgaccgccgccgggtggatatgcggcgcggcgggtctggtgaccaccgtgtgtatggtgctggccctctgccgcatcggcggggcgcagctggcccgcaccgccggcctggctgagccggtatccgcccccaacgccgccaccgccagcgacgaggaagccgccctgtggatgcgggacaacctgcccgccgggacggtgttcgccaccaaccgcaccagcagcacccccgcccccgccgacgaggacggcatctccaacctgtacaccgctttctcgggggtacagtgctatatggagggctggacctacgccatgagcaacatgggcgtggagcagagcatcgtggagcaccgccgcgccgtggtgacccagctgtttgacggcaccgccgacaccgacaccctcaccgccctgtgcgaggaggagggcatcgactgcctggtctggtccaaacggttcgggggcagcgcccccgacctctcccccgcctttgaaaatgccgacgtggccgtctacctgctgggctgacccgcgccagcccacggctcaaacttccggccgaacatccgaacataacaaaaaggctcccgtcttttccgccgcgcatctgcgcagggaaaggcgggagcctttgattcttgcaaagtcccgggcaagaaaattatttcatggtgaccagatcgtactcccgggtgccgatgccgatcttttcggcgtgctccaggcaggtcttgtactcagactcgggggtgcagttctcaaaatggtcgtgatggtcgcagaaatcgggttttgccatctgctccgccagctggcttccgggcaggggctgcagcttcaggcaggcatccacgcaggcctggtccagcgccagggggtcaaaggaggcgaacatgcccacatccggcaggatgggcacgtcgttctcggcgtggcagtcgcagttgggggagatatcctgcaccagcgacacatggaactggggacggccgtccacaacagccttggcatactcggccatacggcagttcaggtccttgaccgctgcccagttggcaaactcgatggcgtcaaagttgcaggcgccgatgcagcggccgcagcccacgcagttgtcggtgttgatgtgcattttgcgggtggtctcgtcaaaggacagaccattgttggcgcactcgtgctggcagcggcggcatccgcggcacttgtcctcgtggatgatgggctgaccgttgttgtgctgcgcctttttgccggcgcggctgccgcagcccatgcccaggttcttgatggcgccgccgaatcccgccatctcgtggcccttgaagtggttcaggctgatgatgatgtcggcgtccataacagcgcggccgatgtaggcctccttgatgtactcgccgccgttcaccggcacagcgatgtcgtcggtgcctttcaggccgtcaccgatgaggatggggcagcccacggtcatgggggtgaagccgttctcccaggcgcagtagaggtgctccagagcatttttgcggctgcccgggtagagggtgttgcagtcggtcaggaaaggcttgccgcccagttccttgaccacgtcggccacggccttggcgtagttggggcgcaggaagcccagattgcccagctcgccgaagtgcattttgatggcgacaaacttgccgtccatgtcgatgccgtccacaccggcggcatgcatcaggcgcttgagcttggtgggcaggccctcgcccagcttggtatgaaagtcggtgaaatagaccttagatttctccatgtttgtttcctcccttgcgcggcggcgtcggccgcgctctcctgtgggtccggtctgttacagacaaaacacaaccggaccaatagttccaacattaggataccaccggtccggcagatgtgcaaatacttataccgcatgtccttccatgcgcggaggttatggctggctctcagcagaaatgctcttccaggtagctcttgagggcctgctcgtccaccttgcggtcgttgtcaaagtcggcggagttttccacatactggcagaagctcttgacggtgtagaccggcagggtgcgggggatggccagttccgccttgggggcggtcatgaccacccgggcgtccaccatgaaggggcggaacttaccctggccgatgacctcgcgcagggcgcggcgggcggtctcggcggagagctgggggttttcaaaggtgcggcggacgccgtcctgcagctgggcccagctggggtcactgctgccgtacaccgtgccggtgtagtcggcgccgtagaccgccgtcacgccgtgagggccgacgatcatggcgcagaaagccgtcttggccgggtcaggctgcaccacggtcaggccgcggcgaagggcggcacggcgcagcttgcgcacaaaggcgtcgttggcgtttttgtcccgcaggggcgcggtatcctccggtccggcgttcaccgcgcccgcatggcgcttgttctcgctgccggcagcgcggtagtacaggacaatggccacgattccggccacaacaacgatcgccagtgcgatatacatcccgatatccatggtgtgttcctctctttgatacagtatttttgtcgcgccgggtcagaccgcgccgtaaacgccgcggacgctgacctcaccgctgaaaatgcgatgctcccccgtggcgtcgtcgctgaccaccaggcggccgtctttgtccacatccagggcagtgccctcgccgccgtcgtagctgacatggcggcccaggttcacgcagtgtgtgcggtagtcggacaaaaagggctcgatgccctccttggcaaagcggggcatcaccgccgaaaatcccggttcggtcaggccggcagccagaatgtccgcgtcccgctccacctgcaccggtacgccgctggtcaaaaggctggccccgtggggcaggcccgcctggtcaaaataagactggggctgggccaggttgataccgatgcccatgatccacgcgcccttgtccggcacgccctcgcacaggatgcccacgatctttttgccgttcagcagcagatcgttgggccacttgatgcagcagtcgatgccgtagcgcccgtgcagcaccttggcggtgaccagacaggccagaaggggcagagtctccggctggaccaggggttcccgcaccacgcaggaataatacagtgcctgtcccgccgcgttgacccaggtccgtcccaggcgtccccgcccggcggtctggctggtggtgtacactgcgccgaacgcgccgaaacggtccagatgttcctttgcccaggtgttggtgttttccacactgggcaaagaaatcagcggatggttcattgctccacccacttccagtcatagctgcacttgccgtcatccacggtgatgacgccgtagcagccgctgtcccgcaggctgccggggttgaagagggccggcacaccgggcaggttgggattgatcagtccccggcgatgagtgtggccgaagagagccacatcggccccccgggcctgtgcggcctcagccagctgatcgtagccgctcttgacatagaactggtttccgtgggtgtaaaagaacagcacccccgcaatgggaacaagcccctcctccggatcggggaacccgccgtcacagttgccgcgcacccggtagaccgggtagggcagcggctcccgcagcagattcaccgcgccgtccagatccttcagcccgtcgcccaggaagaacattgcatcggccgtctcgtttttcaaaatccaccgcagcgcgggcagccgcccgtgcacatcgctgattaccagaatctttgccttgctcatattgcacctcactcaccgtccgggctggcattttccccgtcccggtccgaaatcagttccttatagatctccccgcgggaaaacggcgtccccgccgccgcctgctttgccgcagccgaggggggcgtgccgctccgcagcagcgcttttgccgccgccaccacatcgtctttggtcagttcggcggtgtcgccgccctgaccgggctgtgcgcccgccaccaccagaacgtactcgccccgggggtcgttggcgcggtagtattccaccgccgctcccagcgtggtcttgacgatctcctcatggagtttggtcagttcccggcagagggtgaccgaccggtcctcgcccagggccgccgccaggtcggccagggtcccccgcagcttgtggggagcctcataaaacaggatggtgcgctcctcgccccgcaatgcgtccaggcgcgcccggcgctcctttttggggaccggaagaaagccctcgaacacgaatcgggaagtatcctgccccgacaccgccagcgccgtgatgcaggccgaagcccccggcaccggtaccacccggatgccccggtccagggcatctttcaccagcacggcgccgggatcgctgatgcagggcatcccggcatcggaacacagggcgcagtcctcccccgcctcgatacgggccagaatggcatcgccgtggtgcagggcgtgctcatagtagctgaccatgggctttttcaaccccagatggttgagcagcttcagggtcacgcgggtgtcctcggcggccacaaagtccgctgcttcaaaggttttggccacccggggcggcatgtcgtccaggttgccgatgggcgtcgccacaagatacagcgtgcccgccatggcagcgcctccttccgttggttttgcggggcatctcccccgccggaatcgtcccgatgggacataattcgtcattttagttattatatcgcctgtgtgcggacaggtcaaccggcccggggcgaagagcaaaaaaagaaccgcccgccggagagttttccctcctgcgggcggtgcaagaccggctttcggccggcaaagattcagtagttgtccgggtctgcggttttcccggttcaggcgtccgccttgacctcgttgaccaacttttcaccccgggcaaaggcgcgggcgttttccatggtcacgatggcaatgctctgcagcgccgtgcgggtgaagaaagcctgatggctggtgatgaccacgttggggaagctgagcagcacggggaccacctcgttctggagcacttcatcggagaagtcctcgaacacctggccgtcctcgtcctcgtagacgtccagacccacgccggcgaacttgcgggcgcgcagggcctcgatgagggcctcggtgtcgatgagggcgccccggctggtgttgaccagaatggcggagtcccggatcatgccgatggtctcccggttgatgaggtggtgggtctcggcggtcagggggcagtgcaggctgatgaggtcggacccgcgcagcagttcctccagggagacatagcggacgatgccctccagggaggggttcttgtactggtcgtaggccagcaccgtcatgccgtagccgtggcagatgcgggccatggcagcgccgatgcgtccggtaccgatgatgcccgccgaggagccgtacaggttgtagcccagcaggccgtccagggcgaagttgttgttgcgcaccttgacgtaggccttgcacaggcggcggttggctgcctgggccagagccatggcgtgctcggccacagcctcggggctgtaccccggcacgcgcagcaccgtgatgcccagccgcttggccgcggccaggtccacgttgttgaagccggcgcagcgcatgagcagcaggcggatgccgttttccgccagcacttccagcaccggggcggagcagtcggagttgacgaaagcgcagaccgcgtcgccgcccttggccaagggggcggtatccacgtccaggttggcggtcaagaacttgatctcgcagccgtaatccgggtcggcggccagaacgtcaaagtagtagtggtcgtactctcttgtaccgaaaaacacgatcttcatgcagggttcctcctttttggcgggtgagtgtgggcgggaatttatatcatatcattttagtgtgttatcccgtctcccattatagcatgcccaatcggtaaaaggaagcattcccaatgccaagattttgccctgccgcccgggggattttatggtttttgcccgagatgcccgtcggttcggctttccacatccacgcagacgatctcggtgcggccctcggtgcgcagctggtagctccaggtgccggtgccgcccgacacaatggcggtgcaggacccaaagcgttttttgccgtagttgacctcgttgtaccggaacagccgggacaccagccccaccggccagacctgaccgccgtgggtatggccgcacagggccaggtcggcccctgcggcggcggcctcccgcagttcccggggttcatggtccagccacagggtgtagatgccgtccggcccgccgggcatgagttcggcagcggaaaagcgccggtgttcggtgtacagccagtccttgcggcccacgatgcgtaccggcacaccgtcctgttccgccatgaccgcgacgtcctccagcacccggaccccgccgtcggcaaaggcgcgttccatgtcggtacggtcgtagcaggcttcccgccagtggtggcccaggtcgtggttgccgtaaacgaaatacttgcccatgggagcggtcagccgggcaaacacggcattgaaggcctcgaaatcctcccgaggcgtgttttcatcgtaaatgtcccccgtcagcaccagcaggtcgggggaaagttccgccacccgccgttccagttcctcggcccgggcggcctgcatggtggacccggcatgcaggtcgctgatctgtacgatgcgcagcctgcccccgggcaggggcttttgggtggtcaggcggtaggtggtggtgcacagtttttgcgccctccgccagccgtagaacagccacagggccgtgatggcccaggccagcagcccgccgccgtagaccacctgccagatctgccgcggcagcccgccgatgaaccagaataccagggacaccagatcgcagaacacatagacgccggtcagcaccccggcccagaccatgccggtccccagggggtcccgactgacataactgaccagccctaccagcaaaatcgggatgcccaggtagagaaacggggttttccccgcaaagatctggacaaagggcagctgcatgaaattgagatacagcacggcggctaccaatgcctgcccgatcttggggatggtgaactgtatgaaattgctgtacatggcagcgcctccaacctttgcaagatgcctgtgagaaagccccgggcctccggttcagggccttttgagtccccgtccccggggaccggggctgccgggtggaccggctccaaaccgtccgcccccgcaccgcagccctgtccctgccctcctgcacgggagcgggaaaacgccctgttcccagtatgtgcagccggagccgggactgtgcgcccaaatgtaaaacccggaccggccgccgcatccgcgggggccggtccgggcagttatcggtgatgggaaagagccctgctcacttccagacaggctcaggcctcgccgtttttctcacggatggccttgtcgatggccttggcggcttccttgccggcgcccatggccaggatgacggtagccgcgccggtgaccgcgtcgccgcccgcgtagacgaaggggcggctggtcaggccgtcgggaccgtcggtgatgatgcagccgtgcttgtcggcgtccaggccgggagtggtggagcggatcagggggttggggctggtgcccagggccatgatcatggtatccacttccagctcgaactcgctgccctgcttgacgatggggcggcggcggccggaggcatccggctcacccagctccatctccacgcaggtcatgccgcggacacagccgttttcgtcgctcaggacctccaccgggttagtgagggtcttgaagatgatgccttcctcctcggcgtgctccacctcttccttacgggcaggcagctcggccatgccgcggcggtagacgatgtacacgttctcggcgcccaggcgcttggcgcagcgggcggcatccatggccacgttgccgccgcccacaacggcaacggcatggctcttctggatgggggtgcggctgtcgggcaggtaagccttcatcaggttgacgcgggtcaggtactcgttggcggagtagacgcccttcaggctctcgccggggatgcccatgaagcggggcaggccggcgccggaggcgatgtagacagcctcaaagccgtactcgcccatcagctcgtcgatggtcagcaccttgccgatgaccatgttggtctcgatgtccacgcccagggcgcgcaggccctcgatctcggtctggacgatgtccttgggcagacggaattcggggatgccgtacatgagaacgccgccggcaacgtgcagcgcctcaaaaatggtgaccttgtagcccatcttggccaggtcgccggcagcggtcaggccggaggggcctgcgccgatgacagccaccttgtggccgttgggagccggcggggtgaccggggtatgtacgttttcccggtgccagtcggcgacgaagcgctccagacggccgatgcccacaggctcgcccttgatgccgcggatgcacttgccctcgcactggttttcctgggggcagacgcgaccgcagacggcgggcagcgcactggaagcggacaatacctgataggcggcctcaaagtcgccctcggcaactttggcgatgaaaccggggatgtcgatatccacggggcagccggaacggcagggatggtttttgcactgcaggcagcgcttggcctcattcacagccatgtcggcggtgtagcccagggcaacttccttgaagtttttattgcggacgttggggtcctggctgggcataggacactttttggggtccatattgggcatgttactcgacctccttcttcagcagattgcactctgcttcccgggcgtgggcttcaaaatcgcggtacatggtgccgcggtgcatggcctcgtcgaaatcgacctcaaagccgtcgaagtcggggccgtccacgcaggcgaacatggtcttgccgcccacggtcaggcggcagccgccgcacatgccggtgccgtcgatcatgatggggttcatggaaacgacggtcttgacgttgtatttcttggtgacggccacgacgaatttcatcatgatcaggggtccgatggtgatgacttcgtcaaaattggcgccgtcctgaatgcacttttccagcggggcggtgacaacgcccttgtcgccgtagctgccgtcatcggtcatgaggatcagctcgtcgcagcaggcgcggaactcatcctccaggatgaccaggtccttgttgcggaagccgacgatgccggtgaccttggcgcctgccgcatgcagggcacgggccacgggcagcgcgatggcgcagcccacgccgccgccgaccacgcagacgtttttcaggccctcgatctcggtgggcttgcccagggggccgacaaaatcgtggaggctctcgccctcgttcaggctgttgagctgcatggtgcctgcgcccacgatctgataaatgatgtcaacggtacccgcaacagcgtccgtacccgcaatggtcagcgggatgcgctcggaatcttccttggcgcgcaggatgatgaactgtcccggcttagcttttttggcgatcagcggcgcttcgatcgacatttccgccaccgtggggttaaggctgcgtttttttacgatcttaaacacggtcgttctccttttatactgatggatttttccggcgtggctgtacggacggatgtcccgcgccgtgaaagcattacataataattgtacggcattttgacgtcaatgtaaagaaaaactattcaattcaccggtttgccggaaggctcatttgaccagccggtagaccaggcagggccggccgccggtgccgtagtccatgtccccggccaccatgccctgctgggccagataattcatataccgccgcaccgtcaccaccgaaagccccgccgcttcggcaatgtcctcgcaggtgcgggggcgtcctgggtcggcgcgcaggcaggccagcacccgttcctgggtctgggcctgcatccccttgggcagaggcgcggggggcgcggcgtgcatcaggctgtccagggcgttctggtccagactgcccgcccgcatggccgcccggcggcggcagaattcatccaatgcgcggcagaagcgctcataggcgaagggcttgaccagataatccacgatgcccagccgggtcagggcttccaccgtagcggcgtcgttggccgccgtgatcatgatgacgtcggactccacccccgccgcccggatggcccgcaaaagttccaggccgttcatctggggcatgtagaaatccaggatgaccaggtcggcgggatggcgggtcagccagtccagcgcccgccggggggaggaaaaggtctgcgtcacggaaaaccggccgtccttctcggcatagcggcggttgagctgggtgatgatgggatcatcctccacaataacaacagtgtacatggctgcctccggtcttattcttggtcaggcactgcggcggggtcgggttccccgtccggcctgcggaaggtcacgataaaggagctgcccacccccggcgtggactctacccggatctcgccgttgtaggcgtccaccacgctcttgaccaggaacagcccggtgccgtggccgctgcccttggtggtgatgccccgctcaaagatatgctcccgcaaatcggcggacatgccggggccgttgtcgtccacgctgaggatgagtccccggtcgctttcccggatggtgacgtccacctggtgcagcccgcccgacggcgcattgctgaaggcttccagcgcgttgccgatcaggttgcccagaatggtgatcagccccgaggtgggcaggtagagggcatcggcggacagatggctttcggggtccagggtcatgcgcacgcccagttcggcggcgcggcagccctttccgatgagcagcgccgccaccgacggctcggcaatgcgttccgagatcatccccaccgacagcgcccgggtctgggtcagctgcaatacatattcctccgcctgctgggcttctcccagctgcaaaaggcccagaatgacgtgcagcttgttcatgaattcgtgggtatatgcccgcatggcctccacgatgtgctgcacgccggtcagttccttggccaggttggccacctcggtgcggttgcggaagatggccaccgctcccacgatcttgccgtcccggcgcaccggcatccggtcggacagaatgcgcacatgtttgagggattccagccccacattgtactcagccctgccggtgcgcatgacccgggggatggtggactggggatagacctccgccaggggtttgcccagcaccgccgccttgtcaaaggagagcatctcggcggcggcgcggttgatataaatgatgtgcttttccttgtcgatggcaagcatgccctcgtccagggcgtccagcagttccatccggcgcaggaacaggtcccggaaggcgtccggctcatagcccagcagattgctcttgatgcggcgggccagctggatgctcagcagggtgccgatgcccagcgccgccgcgccgatgaggatgtacaccgccagcgtccggatgaccgtctggtggatggagcgcagataaagaccggccatcacatagccgcgcacctcgccgcccggctcgatgaccgcaatgtaggcgcagtgatcggccccctcgggagcctgggcgtcatcaaacagcggctttccggacgttttcaggctttccatcagcgcctcgtccaggggggcaatgtttccgccggtgccgtcggcctccgcgtcgtagaacacctggggattgccctccacatcatagacggcaaagaggtcgatgcccgagatgccccgggtggtctgttcaatgtaggaggcagcctgctcccagtcctcctcggcggacagggccagggcgtccgacatggactgcaccgccgcggtcagggtgcggtcccgggcggcgctttcctgggtcaggctgatccacagcccggcccccgtggccaggatcatggccgtcaggatgcccagcaccgacacccgccggatctgctggtataccgtctgcccggtctgttttctgtccatggcacgccctcccgttttccgcgtccaggcccctgttgcgggggccagagcatcttctgatgccatgataccacatcggacaaaaagcatcaatcttgcacaaagttgcacaaactttgtccggtttccccggtggaaacccgtcggctttgtaggtttttgttttttttattttcgtaacccttatcctcccgcgcccgcaggagtaatatgtaggcgaaaaagaggtgaacaagtttggaaggtttcaaacaagccctggtcgaatcgcttgccaatgaaacggctttcaccattccggttctggggggcatccccattgcgtcggcggtcctggtatcctggatcatcatggccgtctggatggtggcaacgcttctggctacgcggaatctgaaagtccgcgatcccggcaaggtgcaggtggtcctggagtcggccgttaatttcctcaacggtttcgtcaaggagaccatcggtccgcactggcgtcccttcgctccctatctgggcaccgtggcgctgtacatcggcctggcaaacatcatcagcatttttggtctcgttccgcccaccaaggacatcagcgtgaccgcggctcttgccatcatgagcctgtttctcatctacggagcgcagttccgctacaacggcctgcgcggcggcatgaaacgctttgccgagcccatgcccctgctgactcccatcaacctgatggaggtcgccatccgtccccttgccttgtgcatgcgactgttcggcaacgtgctgggtgccttcatcatcatggagatgatcaagtatctggtgcctgccgtagtccccgccgtcttctgcatctactttgatctgttcgacggcctgatccagacgatcgtctttgtctttttgaccgcactgttcgcgggcgagggcatcaaggaagaagattgacccccgtctcatccccctgcgcggctgatgccgcgccctcaaacacgatattatttcaggaggaacgtattatgtctatcggaatcatcgccgcaggtatcgcagttctcaccggcatcggcgccggcatcggcatcggcatcgccaccggccacgccagcgacgccatcgctcgtcagcccgaagcttccggcaagatcaacagcacccttctgctcggctgcgccatggccgaaggcaccgccatcttcggcttcatcaccgcgctcatcatcatctttgtcggctaagggaggtgtgcccaatgctggacttccagccgtggacgatcttttttaccatcgtcaaccttttgatcctgtatttctttttccgcaagttcctgttcgggcgcatcaacgccgttcttgagcagcgcgaagagctgatcaagtcccagattgccgaggcggaggacaacaacgcccaggcccagtccctcaagcaggaatacgagaccaagctggccggcgcccgtgaggaagccgcccagctggtcaacgacgcaaagcaccgcgccgaccaggcctatgccgaccgcatggccgaggccgaggccgacgccaaaaagaccgccgtggaggcggaggcccgcattgccgccgagcgcagcgagatgctgcgtcaggcccgtggcgaggtcgcgcgtctggccgtgatggccgcgacggaagtcgctggcaagcgcctggacaccgactccgaccgtgcgctggccgaggagtttctggcaaaggtgggtgaggagcaatgagcgaagcgaccgagcgttacgccgcggccctgttcggagccgcggccggggatgcccaggccgtgcgccaggccgctgacgccctgatggcggacagccgtctgtggaccgccctgcaaagccccgccgtcacccccgccgagaagaaggaactgctggcgggcgccgcctgcctggacggccgtgacgacctgaaagcctttttgaacctgctgctggaggaggatcacctcgccgccctgccgcaggtcatggtggaattttcccgcctggccctggccgcccagggcggtgtcaactgcgttatgacctgcgcccgcgagccggacgaggccacccaggaagccgtccgcaaggccgtgtgcaaactgcggaacgcttccaacgccgttttgcagatcaagatcgatccctccctgctgggcggctttgtgcttgacgtggacggcgtcacctacgaccgcagcgtcaagggccgtctggaccgtctggcccggggcatccaggatgctcccgccgacgccggtctggatcagctggccgagcagatgaaacagtccctccagggcagcagcggcgacgccatggctgccgagaccggtcgcatcattgagatcggcgacggcatcgccacggtcagcggcctgcgccgcgccgtctacggcgaactggtggagtttgaaaacggcacgcccggcattgttctggacctgcgccgcaagcgcaccggcatcgtcctgctgggcagccaggaaggcctggccgaaggcagcgttgtccggcgtaccggccgtcccgccgacgtgcccgtgggcgacggcctcatcggccgcaccgtcaacgccctggcccagcccatcgacggcctgggccccatcgagtgcaccgagacccgccccatcgagcatgaggcttccggcgtcgtcacccgtgagccggtcacccagcccatgcagaccggcatcctggccatcgacgccatggtccccatcggccgcggccagcgtgagctgatcatcggcgaccgtcagaccggcaagacctccatcgccatcgacgccattctgaaccagaagggtcagaacatgatctgcatctacgtgggcatcggccagaaggcttccaccgtcgcccgcctgcgtgagaccctgaaaaagcacggcgccatggattacagcatcgtcgtctccgccaccgcaggcgagtctgctcccatgcagtacatcgctccctatgcgggcgctgccatcggcgagtacttcatgtccaagggccgggacgtgctcatcgtctacgacgatctgtccaagcacgcggtcgcctaccgtaccctgtccctgctgctgcgccgctcccccggccgtgaggcttaccccggcgacgttttctatctgcattcccgcctgctggagcgcgcctgccgcctgaccaaggaatacggcggcggttccatgacggctctgcccattgttgagacccaggcgggcgacgtttccgcctacattcccaccaacgtcatttccatcaccgacggccagatctacctggaaagcaacctcttctttgccggacagcgtcccgccgtcaacgtgggtctttcggtctcccgtgtaggcggcgcagcccagacccgggctatcaaaaagaccgccggcaccctgcgtatcgacctggcccgctaccgcgagctggaagtctttacccagttcagctccgacctggaccccgagacccgtcaggctctggatcacggcaagcgcatgatggcgctgctgcgccagcccctgtgccagcccttgtcggtcagccatcaggcggtcatcctgtacatcgccacctccggcctgctgagcgacgtgcctctggacaacgtcaatgcctttgccagggactttgccgatctgcttgaccgcgagcagcccgcgctgatgcaggagatcaacgacaccggcgcgctttccggcgcagccaccgaacagatccgcaccacgctggacagctataaagagcaggtgagcgccacatggaaagcataaaggagatccgcacccatatcgacagcgttgagcagaccctcaagatcaccaacgccatgtacctgatctcttcctccaagctgcgcaaggcccgccgtcagctcaacgacgtcgagccctacttcatgaagatcaccgagaccatctcggacatcctgcaccgcacgaacgacgtggaccacgcctactttgaccgccgcccggacaaaaagcaccgggtgggctacatcgtcatcaccggcgacaagggcctggcaggcgcgtacaaccacaacgtcctgcgcatggcggaggaacacctgatcaaggacgccgacgccaccctgttcgtcatcggccaggcggggcgcaactacttccgccaccggggcatcgcggtggacggcgagttcatgtacactgcccagaaccccaccatctaccgggcgcgggagatcagcgacaccttcgtggatctgttcctgaaaggccgcctggatgagatctacgtggtctacaccgaaatggtcacccccatgacgctggagccgaagatcctcaagctgctgccgctggaccgggacgccttcccctggaacccccgtccccgggccgacggttccacccgccgggaggtcgcgtatatgccctccccgggacgggtcctcaaccacatcgttcccagctacctgaaaagcgttttgttcggcgctatggtggagtccttctgctccgagcagaacgcccgcatgaccgccatggacaccgccactgacaacgcccgctccctgctgaaggagctgtcgctgcattacaaccgcgcacgtcaggcggccatcacccaggagatcaccgagatcgtcggcggctctcagcctgccggggatgactgggatgacgactgggacgatgactgggaggacgacgcccagtgattttatccggccccggccggagttcgatacagaaaggaaagactgcaatgcaacacaaaggtgtgatcgcgcaggtgttgggtcccgtcatcgacgtccagttcgatgagggcagcctgccgcagatcaacgaggagctggtcgtcgagaaggacggcgagcgccgcgtgatggaagtcgcccgccatgtggggcacggcgccgtgcgctgcatcctgctttcgccgggcgaaggtctggcccgtggtgacgaggtcatcgcccagggccatgccatcgagacccccgtgggcgaagcgacgctggggcgcatgttcaacgtcctgggcgacgccattgatgaaaaaggtccggtgaacgcaccggaaaagtggtcgatccaccgcgatccgccgccctttgagcagcagaaccccaccgccgagattctggagaccggcatcaaggtcatcgacctgctggctccctacacccgcggcggcaagatcggcctgttcggcggcgccggtgtcggcaagaccgtcctgatccaggagctgatccgcaacatcgccaccgagcacggcggctactccatcttcaccggcgtcggcgagcgtacccgtgagggcaacgacctctggcgcgagatgggcgagtccggcgttctgcaaaagaccgccctggtcttcggccagatgaacgagccgccgggagcccgtatgcgcgtggctctcaccggcctgaccatggccgagtacttccgcgaccgccagaagcagaacgtgctgctcttcatcgacaacattttccgttatgtgcaggccggttccgaggtcagcgccctgatgggccgcatgccctccgccgtcggctaccagcccaccctggccgatgaagtcggcgctctgcaggagcgtatcacctccaccaaggacggctccatcacctcggtgcaggccgtttacgtccccgccgacgacctgaccgaccccgccccggccaccaccttcagccacctggacgccaccaccgtgctttcccgtaagatcgtggagcagggcatctaccccgccgtcgatccgctggaatccaccagccgcatcctggagcccgatctggtgggccgccgccattacgacatcgcccgtgccgcccaggagcttctgcagcgctaccgcgacctgcaggacatcatcgccattctgggtatggaagaactgtccgaggaggaccgccgcaccgttgcccgcgcacgccggatgcagcagtacttctctcagcccatgttcgtggccgagaccttcaccggtctggaaggccgctacgtcccgctggaagagaccctcaagggcttcgaggccctgctgggcggcgagctggacaaatatcccgagtcggccttctccatggtcggcactgttgacgaggtgcgcgagaaagcgcgcgctcagggggcgatctgatggaaaagaccttcatgctggagatcatcaccccggaaaagcagttttttaccggtgaggtcgaaagcctgatcattcccgcggtggacggcagctacggcgtacaggccgggcatgagcccatcgtcaccgccatcgagccgggcgaggcccggtacaaggtggacggggtctggcacaccgccgttgtgacccagggctttgccgagatcatgtccgactatgccgtcgttctggtcgccacggccgaacgtcccgaggacatcgacgaggcccgcgcccgccgtgccaaggagcgcgccgaggaacgcctgcgccagcacgaaagccggcagcagtacttccgcagcaaggcggccctggcccgcgccaccgcccgcctgcacggcagcagccgcaggaaataacatcgcgtatatcttttttcatagaggggttgacgcccgccgcgcccgccggacatccggccgcacggcgggcgtcgtgttttgtttcctgccggggcattgccgccccggcgcggtcccccgccattttccccgtcctcccgttccctgttttgctccgctccctgccggggcggacagccccgccttgacgcaggtccggttttgcggtatactgttcaattagatacagcagtagaaactgcggaaagggaacggatcactctatggacgccgacggcgacgcggaaccgagccgaccgaacacgcatattgaatcaaaccaagcatagctccaccgggaacccggtgccgggctatgcttttttgtgtctttgccgtatcttgcacctgatttttgaaaccaaactttgaatctgacatctgacaaaggagagaatctttcgtggaaaacctgccctcacaaattttactgcaggtggtgtttatcctgctcaatgccttttttgccggctccgagatcgcgtttctgtcgctgaactcggtcaagctgggcaaaatggcggaggatggcgacaagaccgccgcccgcctgctgtctctggtggaaaaccccaaccgctttttgtccgccatccaggtggccatcaccctgtccggctttctgggcgcggccttcggtaccgagaacttctccggctacctgaccgacttcctcgtcagcctcaatctgcccctgccggagaacgtgctcaccgtcatctccatggtggtcatcaccatcgtgatctccttcttctccatcgccttcggtgagatggtccccaaacgggtggccatgcagcagccctatgcctgggccaagaccgccctgggggtcatgcgggtcatcagcctggtgtttgctcccatgatggcgctgctcaacgtcaccaccaacggcacgctgcgcatgctgggcctcaagaccgaggcggaggacgacgccgccagtgaggaggacatccgcctcatggtggaaaacagcggcgagcagggcgccatcgcccaggaagaacagcagtggatcgagaacgtgttcgacttcggcgacatggtagccagcgacgccatgaccccggaacccgacgtgacggccttcagcctggaggaaagcaccgaggacattctgcaggccatccgcaccaccggtctgagccgctaccccgtctacgaggaggacatcaacgacatccgcggcatcctcaatgcccgtgactttttgctcaacctccagcgggaacagcccaagaccctggcggaactgctgcgccccgcctactttgtgccggagagcgtccacgccgaccagctgttcaaggatatgcagtcccgcaagcagcacctggccatcgtggtggacgaatacggcggcacggcgggcgtggtgaccattgaggacctgctggaacagatcgtaggcaacatttacgacgagttcgaccccgaggagccccagcccatcattgaggtcggccccggcatctggcgggtggagggcagcctgcgggtggaggacctggccgaagtgctggacatcgacctgcccgacgacctggactacgacacggtgggcggcatggtcatgagctgcctgaacaccatccccgaggacggcacccgcctgacggtggagaccaacggcctgcgcatccgggtggaaaagttcgaggaccgcaaggtctgctgggcattggtggaaaagctctcccccgatcccgagaccgaggacggcaaggaagaaaagtaacgcgttttttatccttttttgcaccaggtgtacattgcgccgtacttctggatatgctacaataaaagtccgctgtggaccgttcatgcggtgcacagcggttcgtgttttaccggcacaggaaacgcctgcgccgtgtatcgtcaactgacagaaagagaggccgttttatggctgcaccccaacccatcgatccccggtcctggaaaaaggaccttgccgcttttcgggagaaaaccgaagatttttacgccggcaatcttgacaaaatggcttacaaaggcttttccggcctgtacggcagctatgcccagcggggcggcaaagccaacatgctgcgtctgcgcatgaccgccggccgggtcaccccggaaaaactggcctttgccgccgacgcggtccgccgccatcaggtcggccgcatccacttcaccacctgccagaccatccagctgcatgacctgcagcccgatgccgtctacgacatcatggagagcgccctggacgccggcatcgtcaccatgggcggcggcggagactatccccgcaacgtcatgtgctctcctctggccggcgtggaggcggacgaatactttgacgtcctgccctgggccgaggccgcgggcgactacctgatgcactttgtcaaagcggaaaagatgccccgcaaactcaaagtgggcttttcctcctccccctccaacgcccctcacgccacctaccgcgatctgggctttgcggcccgtccggacggcaagttcgacgtgtacagcgccggcggcctgggcaacaatccccgcttcggcgtgaaagttgccgagggcatcgagccggaaaagatcctctactatatcaaggccatgtggctgaccttccgtgcctacggcaactacgaaagccgtgcccgcgcccgcacccgctatatgcaggacgccctgggcggccccgaggcctacgccgccgcctacaacgccaagctggaggaagtctttgcctccggcgaggacctgaccctcaccggcatcgcgcctgcccccctgaccaaggccggggacggttccgccgcgcccgaaagcgcccgggtcatcccccagaagcagcccggcctgtacaccgtggcatggcatcccatcggcggccagcccgaccccaaggtattctgcgcggtggccgacgccgtctgcgccatgaacggcgccgagatgcgccttgcccccgatgagaccgcctacctcatcaacctcaccggcgccgaggccgccaaggtgctggaactcaccgctcccgacaccgccgccagcctgtttgagacgtcggtgagctgcatcggcgcttccatctgccaggtgggcgtccgggactcccaagccctgctggccgcctgcgtggctgccgtgcgggaagccaacctccccgacggcgctctgccccagatccacatctcgggctgcccgtccagctgcggcacccaccagaccggcatgatcggtttccgcggtgccgtcaaagtcatcgaccgccagccccagtccgctttcaccctgtatatcggcggtcaggaccgccagggcagtgagcggatgggccgggaactgggcgttgtcctggaaaaggacatccccgctttcctggtggagctgggccgcaccgtggccgcttccggcagcgattttgccgcctggtacgccgccgactcctccgcctttgaccgcgtcgccgtcaagtatctggcctgatttttcccctgatatgccaaacgcccccgcaccgggaactcccggcgcgggggcgctttttgtttcttaatcagggtcagccgcacctcagtacagcatttcccgggcggcggcgtacttgctgatgctcatgccctgcccgcccacggtggagagggcctgccgcacatagccgggcagatagcggtcatacttgacctccaggatcaccgccccgccggagtgcacccccagcatggggacgccggggtcaaacagggcgtcgcttttggcggcgcggacatggcagtccagggtgatgcgcacccgctccacaggcatggtccaggcggtgcgctcgtagtcgatgagggcggagggacggcgggggacccgggcaaactcggtccaggccctgcgggcggccgccgtgtcctgacggagcagcggcgaggcatcccctccgatgagggccagcgcctcctcccggtcaagccagacgccggtcttgtgagagtagactccgcttttctgcttgatctccagccggacccggggcgtttcggtgtcatagatgcgcaggcggaccttgcgacggtcgctgacgcccagcaccttgtccagataatccccgtcgccgggggtatcaaagtacaggctgcggatgtaataggcccccgcggtggaatacttgtcccgccgcagcagcccgtccagcagtttttgggtgtaggcggcctccccgggggtgaggaggaacttttcctcgtgccggtccacggccagagccgccccgcccgctgcccggaggggggtcttgttcaaagcattcagattcatgccgcgccctcctccgccagctgcagatattgatccaggtagtcgagcatgatgtccgcccgccgggtaaagtaatcccgcacgctgtccacctgctcttcccattcctccacggtcatttcccagggttccaactggtagcccaggatccggtcggccaaaggcgccaactcagtgacgcccaccttctgccgggccagatcctgctcgatctcggggcggagcatctcggcccaggcgtcaaaggcgggaacgatgttctcgggtgcgtagatcgtctccatctccctgcggtattcctccgcaaagcgctcccggaactcggcgctggcccacagtttctggaacaggttgtcaatgaccgagtaccagggcgccgtctcgtgggtctcaaaggagaactcgttctccagcaggtaggcaaaggggtctacctccacgtcgatgagggttgcgtccaggtcgttgagcaaaaaccgccagcggccgtcggcgtagggattgtcctcgtccacctcggcgctcttccacagaatggagttgttgccgccgttgtacaggccgtcggcgttgtaggtgtacatctgggcaataatatagcggatgtactcgtccacatccacattttgctccacccaggccatgccctcgggggtggtggcgtccagggcatccacccccagaccaaaggcgctcttttcgggctgggcctgctcatcgggggtggtgccgggacagatcaggttttcttcctcaatgccgtaatggcggaggaagaaatcggtgtttttgctttcccgcacggtgtagacgccccagtattcgtcctgcaaaaacagcaccaccggctggttgtactgggtgcccacgtccagcccgtacagataattgcagaggaaggcatcctgatgcagggaggtataggcggaaccgttgccgctgccccgcagcaccagggtgtccagggcatcgccgccgggggcctggtccagcaggtcggaggtggcgccgtcctgcagcttcagatgcaggtttttcatgacagagtccagacggctccagccgccggacacccgcaccgtggtgtcggcgttgagcagctcgctgccgtcggtgtccaggatctggatgcgggcgtcgatcttctcgctgctggtaaagttgcccacacggtcggtactgccgtacttgcgcagggtgtagtagctctggccggggacgtagatgccctccgggccgaaaaggtcgtccgcctcggcggtgacgctgaccaccggcagggtatagttttccagccccacccagtaggtctgggtggtgacggcttcgcccagcacgccgtccttgtagacgcaggccgtgaccgtggtggccttggccaccgggtcgggggcatagtcgcaggcataacccaccacccactcgcccaggaaggcggagggcagactgacgtactcgttggcgtcgccctcccggctgtcgatggtgatggggccggtgtagatgttgctggaggtggtgggcagactgccgtccagggtatagactatggcggcgtcggggtcgtcgcagctcagggtcagctcaaaggcctccccgtaaaagcccgcccgggcggagaattccactttccccaggtccaccggctgcactgtctcctccaggaaacgggtggagttggcgctgcccggcgtgggcccggccagcacacccacccggctggcgtcgccccgcaggcggccgtaggtcagatcgtattcctggctgtcataatccagggtatccaccgtgccgccgtcagggtcggtgagcaccagcgtctcccccttgcgggaaagacggaaattggtgtgcaggctgcccgcggcgtcgtagccgtccttgccgtcggcaaacagcaccatgatgttgtttgccccgccgctgagcaccgtcccctcggggaaggtccatttgtaggggcggtcggggttgtcgctcaggccccagccgtccaggacgatgtcctcccccgacaggttgatgagctcaatccagtcccccgtctcgccgtcggcgtcggtcaggccggtgaggtttttgacgcagatctcattgatgacgacggtgtaccccgcgttagccgaaagatccggcagctccgacacgcaccacacccccgcggccagcagggccgccagggccagaagcggtgccagaacgcgcagcacccgcttgtaaaacggaatactcatccgatggtctctccgctgtaactgacaaggttgacgctctccacaccggtgcaggccttcacggcgtccaccagggcggcttcgtttttgctgcggatacgcagttcaaaggtcacttcctcgtcggtgccgtccaggctgcgcatgcgcagcttgcaggcacggaccttgcccttgacggcctcctgcacggcggcggcatccagagagccctgagcgccccgcaccaccaaaagaaagctgaccgagtcatacaggtccagatttgccacggccagcaccacagcgatgaccacactgcccagcgccccggccagatagaactcgctgccgcaggccaggccgatgctcaccgcccagaacagaaaagcaatgtcccggggttccttgatggcggtacggaaacggatgatggacaagctgcccaccataccaaggctgagcgccaggttggtgccgatgatcatcatgaccaccgtggtaatcagcgccaccagcaccagcgtgatattgaagtttttggagtacagcgtgccgcggtaggtagcacggtagacaaagtacatgaagatgcccagcaccatcgccgccagcagcgcaaagcacatctgggcgatggaaacgctggtgttcgtctccagcagatattccaaaatctgacgtttgctcatggataagtccctccggtattgccgcgctgccagggcaggcgtaaattcagtttattataccacattcccgcttttgcgacaattttctgtttctgcttcccggccgccgggcaaaaatttaccggccccggggaaactttcgtccgggaccgacaggcaaaaagattgccccctcctgcttgcggtaacaggagggggcggttggggtatcgttttggtgtgaggaggaatcatgttacagggttacggttgcggctccgtccctgtgagtatagaatacccaagacttgcgaagaaaatattatcacgctgtgaacattctgttaatttggccgggccccagggctttcctcgccgtcttgcgacaattttatcgctgtttcgacaattttataaaattgtgaaacttttttctcccctttttatccggtcctgcccaagggttttactgcgcgttcccctcctcggggcggctcatggcgatgacctcgggggtgatgggcagttcccggtgccagacgccggtggcccggtagatggcatgggcaatggccggggccggggtgttgatgacgatctcgccgatggatttcgcgccgaagggcccggtgggctcgtggctgtgttcaaactccaccttgagatgtcccatatccagccgggtggggatcttgtactgcatgagggacgactccaccgggcggccgttgtggtcataggtgacgttctcggtcagggtcatgccgatgccctgcacgatgccgccctccgcctggatgcgggccagggcggggttgatggggatgccgcagtccaccacggccatgtaatccagcaccttcacttcgccggtatccttgtccagctcgatctcggccatgcccaccataaagggcggcggggacacggggctggaatgggtggcggtggactccgccgcatggacgttgcccacctgggacttgtaggccacttcctccatggagacggtgcggccgtcggcggcacagcggacgtggtcgccctcaaagacggtatcctccggggcgcatcccagcaggtcggcggcaatgcggcagatctggcctttcagttcgttgcaggccttttccaccgccttgccggtaacgtaggtggtggaggaggcataggagccggaatcgtagggggagacgtcggtgtccgccccgaacacggcaatgttttccaccgggcagtccaggcattcggcggccatctgggccaggatggtatcgcatccggtgcccatgtccgccgcgccgataatcaggttataggtaccgtcctccgacagcttgacggtggcggagcccacgtccacgctggaaatgcaggagccctgcatggccatggcgacgcccgccgcccgcaccttgccgttgcccatatcccgcacgggatagcggtgctcccagtcgaacatttcccggcagtgggccatgcaccggtccagagcacaggccgcagcaggctcgccgtagtaggcgggcatattcatgccttcccggaccatgcagcggtcacgcagctcggtggggtccacgcccagccgctcggccagctcgttgactgccgactccaccgcaaaaatcccctgggtggcgccgtagccgcggtatgcgcccgcgggctgtaaattggtgtagaccacgtcgtaggcaaagcggaaggcttccaggctgccggtgtacagcgggatggacttgtgtcccgacaggcccacggtggtggggccgtgctcgccgtaagcgccggtgttggacagggtatgcaggtccagcgcccggatgcgcccgtccgccgaagcacccagccgcacccggatctccatctcatggcggggagagcctgcgatctgggactcctcccgggtatagatcagctcggcaggacggccggtcttgagggtgacaaaggcggggtagacctcgcagacggcggtctgcttggcgccgaagccgccgccgatgcggggcttttccacccggatgcggcttttggggatgcccagcgcccgggacaggatccgccggcagtggaacacgatctgggtggaggaaatgacgtgcagtcgtccgtagcggtccatctccgcataggtgcggaaggtctccatcatggcctgctggaaggcacgggtgtggtaggtgcggtcgatgacgatgtcacagtccgccaggactttctccacgtcgccgtcggactccacatcgctggccaccagatttcgcttgttgtcgccgcccaccgggcagggaggataccagtcctcctcgggatgaacgaggacgggattgtccagggcctcgtgcatatccagaatggcgggcagcagtttgtatttgactttcaccaggcgcatggccttgttggcggctttttcgttttccgccgcaatgatggccaccgggtcacccacaaagcgcagctgccggtccaaaatcagccggtcatagggggagggttccgggtaggtctggcccgcgatggcaaagcgggtcttgggcacgtccttccaggtatatacggctaccacgccggggactttctccgcgatggaagtatcgatctcctccaccagggcgctggcatgggggctgcgcagcagcttgaccaccagggcgtcccgggggacgatgtcatcggtgtagaccggcttgcccagcaaaagctgcatcgagtcctttttgcgcatggcatggcctacgtattggtaattttcagttgccattgtgcgctcctttcccctttttgctgtccagataggcgcggatgccccgcagctggccctcgtagccggagcagcggcagagattgcctgccagatacccccggatctcgtcgtcggtggggtcggggttttcccgcagcagggcgatggtgttcatgacaaaaccggggttgcagaaaccgcactggtcagcgccctggtcggcgatgaagccgacgaaatcggcggcttcctcctgcaggccttccagggtggtgacggcgtggccgtccgcccgggcggccagcaccgagcatgacaataccggcacctcatccagaaatacggtgcacaggccgcagttggaggtctcgcacccgcacttgacgctgtaacagcctttttcccgcagcaggtcaaacagggtggtatccgcctccaccgcggcggtgacggccttgccgttcagtttcagtttaatctccatttccaaaacctcccacctgggacaaagtccgctcggccagcacccgcaccagatggctgcggtaggccgcgctgccacgggaattgctgcccgtggggatctgtttttctgcctgttcggccagctgtttgacggtatccggggtcaggccgccggcggcggcatcggtcaggtccagcaccatggccttgcccggccgtgcacccacgcacaggcgcaccttgccgtccagccgggacgcggcgcaggtcagcaccgggaaatcggtgcgggcaatgcgcaccgcccggtaggccacggcccccggcgtctttttaatgtggatgcgcaccagcaggtcccgggtggtctggggcagctcggcaaactgggccaggggcatccggcccgcgccgtagagttccacctcggcatccagggccagcagcagggtcagcacgtcggaaaagccgaaccggccatagacgctgccgcccaccgtggccaggttgcggaactgcacgcccacaatatctcccagggccttggcggcggccccgccggtataggcggcaaagccagggtggagttccagcttgcgcagcggcgtcatggcgccgatgacaaaggcgtcgtcggtctcttcaatggtatccaggccaaggtcgcacaggtccacggcggtgttcacgctgccgctggtctggcgcagccacagcatgcccgccacaatccggttgcggcggttctggcacaggtcatacgcctgctgcaggctctgcgcgcggacgtagttttggatggtcatcatgggacagtctcctttttttcggggcaaaagggcaaaaatcattcttttgcgcactgtttcatcctgattgtaccatattgcatttgaataaggaagaaaggtctgctataatctcgttgtactttctaaactataacggtcgcgaggcagggggcgcctttgccccgcggccggaaaaaggagtttgatctgccctatgaagcgtcttaccacccgcgtggctgctcttgccaccgcccttgccctgacggtctccctggccgcctgcaacaacgtcgccgataccagccagtcctcctcggtgacggtggagacggaggaatcctccgccgcccccgccaccccggaggaacctgcccagtctgcggccgtctcctatcccctgacccttaccgatcaggcaggccgcaccgtcaccattgaaagcgagccccagaccatcgtcagcggctactacatttcctccagcctgctcattgccctgggccgtgccgaccgcatggtgggcatcgaggccaaggcggacacccgccccatctacagcctgagcgcccccgagctgctggaactgcccagcgtgggctctgccaaggagtttgacctggagggctgcgcggctctggagcccgatctggtcatcctgcccctcaaactggagagcgccgccgactccctgaccgagctgggcatccccgtgctgctcatcaaccccgaggaccgcaccctgctggccgagaccatcactctggtgggccaggccaccaatgccgtggaggccgctgacgaactgctggccttcacccaagagcagcagacccgtctggagaccactctggccgatgccgaccgccccgacgtctatctggcgggcaactccgacctgctgtccacggcgggcagcgccatgtaccagagcgacctcatcgacctggcgggcggccgcaatgtggcggaggacattaccgacacctactgggtggacatcgactatgagcaactgctggcctgggaccccgactacatcatcctggcctccgacgcctcctacacctgcgacgacgtgctgaacgacgccaatctggccgactgcaccgccgtcaagaacggcaatgtctaccagatgcccggcgacgccgaggcctgggacagcccggtccccggcggcatgctgggcgcggtgtggctttccaccgtgctgcatcccgacctctgctccgctgacgaggccaacgccgtgatgggcagcttctatgaaaacttctacggcttcacctacccgctggcgtaaggccggggggctgtgcgcggcagcgggcgccctgctggtcgtcctcggcctgtgcagcctctttgtgggcaaatatcctctgacactggaaggcctgctttccggggaggaaatacaggtccgggtgttctggaccctgcgcttcacccgcatgctggtgggggtgctggggggctttgccctgggtgcgtcgggttttgtctaccagactgtgttccgcaatcccctggcttcccccgatgtcatcggcgtttcctcgggggccagtgcgggagctgcggcaggcatcctgttctgttccggcacggcggccgtcactgcctgcgccttcgggggcgccattgcggcggtctttgcggctctggccctggcggccctggaccgctcgggacggagcagcaccatcgtgctggcgggcattgcggtgcacgctctggcccagacggcgctgatctgtctcaaactcaccgccgacccggaacgccagctggcttccatcgaatactggatcatgggcagccttaacggcatcaatctgcactccgccgccctcaacatggccctgtgcgcggtggtgctgggggttctgtttgccctgcaccggcaggtcatcctcctctccgcccgggaggacgagacccgcatgctgggcgtcccggtgggcaggctgcgccttgtggtgctgctggccgccaccctcaccgtctcctgcgtggtcagcctgacgggacttatcagctttatcggcctgctggccccccacgccgcccggctgctcacccgctccaaccgcatgggcaccatggtgctcagcggcctgctgggcggggtgctgctctgcgccgcagacctgttggcccgctccctggccgagaccgaactgccggtgagcatctttaccagcctgcttggggcgcccttccttatctggctggtggtaagagggaggcgtgaactgtgaaccacgaaccgtttttcaccgtcaccggcctgactgccggctacggcggcccggatattctgcgtggggtggagttttccacagcccccgggctggtcaccggtattctgggggccaacggcagcggcaagaccacattgctcaaggcggtctgcgggcttttgccccacggcgggcagagcctgctggaaggctgcgacctgggcagcctgccgccccggcagctggcccgtcggtgtgcctacatcccccagcgcagcggcatcggcatcgacatctcggtgctggatgtggtcctcatggggtataaccctcatctgggcctgctggaacgccccaccgcccaaatgaaagagaccgcccgccgggcgctggccctcaccgggctggcggggcgggaggaggaaaactaccagaccctgagcgagggccagaagcagctgtgcatcctggcccggacgctggtttcgggggcgcatctgcttctcttggatgagccggagagcgccctggactttcagctgcgttaccggatgctccatcttctccgccgctgggtggggcaggggcgccggggggtgctggccgccctccacgaccccatgctggccctttcctgctgcgaccgtctgctgatcttgcaggagggcaaacccctggcggtgctcgcccccgcttgcgacccgctgccggaactggagagcgccctctcggccatttacggccccgtcagcctgacggcctgtgttggccgggacgggcggcggcatcttgtcatgctcagcgaagagcgggaggaggacgaaccatggaacctgtgaccaaggtatttttgctggacgacgagggggaacgctttttcggggaaggcccctaccagcttttgctggccgtggaaacggaaggctccctccgggccgcggcggcgtccatgggcatggcctatacaaaggccctgcggctggtccgccatgccgaacaggccctgggctttgccctgacccagcgcaccaccggcggcagggacggcggcggcagccgcctgaccccccagggaaaggagtttctggacaagtatgcagcctaccgcgaacaatgtacccaggcctgtcgcggcatctattgccaggtatttggcggtcagcggtaaacgccacctgtttctcaccgggggccggggcgtaggcaagaccacattgctgaacggccttctgcccctgctctgcccggagcccgtccccggcgtgcgcacccgtgcggtgcgcggggagggagtggacctggtggaggtgccctccggccgggtgacccgggtgggggtctttgaccctgccctccccggccccgaaaaccgcatgcgtccggtgcccggggccttttccggggccggagtgcgggcgctggacgcctgcgccgaagcctcctgcccctgggcctttgtggacgaggtggggtatttggaatcccaggacaccgcctatcagaaagaccttctccgcctgttggacaaaaagcgggtggcggctgtcctgcgcagccaggacctgccctttctcaacgccctgaaagcccgttccgacgcctgtgtcatcgacctggaccggccttttagaaataccggctgcgtcgtcatggcatcggggctggggcgccggttcggcggcggcaagctgctggccaaactggatcgccggacgcttctcgaccgggtgctggatgcctcggagcagggattttcccgccgggtggtggtgacccgggacgccggggtggaggccctctgccttgcccggggcgtcccctgcctgcgccacagcctgcctttgcgcagcgacacggtacggctggggctggagtttctcacaagggatagccccctggacgcctgcgtctttttccccggggaccagcccctggtcacggcagagacggtgcagaccctgctgctggccgcggctctcacccccggcgccatctggcgactgggatacggacagcaggccggagcgccggtgtgctttccccgccccctctttgacgagctgcgcaccctgcccgccgggcggggcggcggggccgtaatgaccgcccacccggagcttgtacgggtgctgcccgccctctcccccgccgagctgcgggacgtggacactcccgccgacctggcggagctggaagccctgctcaaaagcctccgtccctgacaactgcataagtttccgccgtccggtgcaaaaaccgggcggcggattttttatgcccgccgcccgatttaacacttcgcaaacaaaacgcaagcaaaccgccaacaatccggccgtatactgtgtccgcaacgaagggaaagccaccgcggcttcccaacagaaccaggaggtcacgaacatgagtgaatatcatctgaaacccggcaagctgggggaaaaagtcattgacgcttacaagggcatcgaggaaaaatttgtggatacctttttggaggaggacggctccctcaagaccggcggcatggccgacaaggtcaccggcgcctaccagaaggtggaggacaccgtggtaggcggctacaaaaaagtggaagatacggtggtgggcggttacaaaaagatcgagaccgcctttgtggacacgtttctggaacaggacgacggcgcaaaccattgacccccgccgctctcaccccatcgtttgacgatcattacaggaggaatttcccatgaaaaagaaaaactttgtcaccctcatcctttccaccatcggcggcattctgtttgccctgggcatgtgcatggcgcttctgccccagtggaacgccatgaaccagggcgtggtgacgggcggcgcgggccttgtggtgctgctcatcatggttctggtccgccgccggatggagggcaaacccgtcgtgtccctgaatttccgcaccgtggccattgccctgctgggcattgtgggggcgctgatgctgggtctgggcatgtgcatggtcatgctgtggaacatgctgatccccggcatcggcatcgggctggcaggcattgtgctgatgctctgcctgatccccctcatccgcgggctggaggactgatgcttcttcccgcaggctgcgttttttccagggcgtcccgccgcggcggggcgccctgtttttgccgccgcggcccgttaacaaatctcaaacaaaaccacaacaaaacgcaaatgcacccacggtaacataaagacacttctttccgccgcccgccctgcccaatggagacaacgccatgccctgcaacacccgacctgcccgccgccgggccaacccatttccccgcccgccactgctgccctcctgcctgggagcggtggttttttcggcggcgtcgctggtcatcgtggctgaaccggaaggccttgcccttccgcccgagccggtacagtatgccgtctacgcgggggcggcggtatttttgtctctggccgtgtgggcgctggtcctttttgtgcgccgcaaaagccctctgcgggccgccgcggatgccgcccaccggcatcccctgctttcccgcctgtatgacgaccacgctttccgcatcctatggacggggtacggctccctggcggtgaacgccctgctggctctgtccaagctggccgccgggtggtggctgtcctcccagtggctgatggttctggcggggtattacctggcgctgtgcctgacccgggcggcggtgctgcacgcaagccgcgccgccgccaaactggacgaccccgccgcccgcctgcgctccggctggcggtcctaccggctgtgcggggcactgctggtggtgttgtccctgtccatgctgggggtcgccatcctcatcgtgcgggaaggccgcggcttttcctacgacggatactggatctttgccgtggccctctatgacttttactgcctgatctccgccctggtctttctcatccgctttcaccgccgccggtccccggagcttctggccatcaaacagatcagctttgcggcgtcgctggtgtccatgctgtccctgcagaccgccatgctggccgcctttgacacctctacccccgccgtgcgcagccgcatgaacctggtcaccggcagcgccgtctgcgggctgctggccctgctgggcatcctgatggtgctgcacgcagggcgcaagctgaaaaaactgcactaaaaaaccccaaagcgggaccggaaaatccggtcccgctttgggattgtgtaagaaaaaagaagaagcaaaaagaagagaagacttcttttgggaaatgtcggggatcaggtgttgtccgcctgtttggccgccttggcctttttgccgctgcgcaccgccatgacgatagacagcactgccagcaggccgaacaccacatcacagacgatgaaggcgatctgccaccaggtgatgacttccaccacctgcatgttggggctgacgccgttcatggcgttggagttggccacggtgtacaggatgcgggcggtcgcctggcgcatggcgctgacaacggtggcgtcgtcctgatactcacgcagcttgtcggtccacttggtggcgtcgttgcagtcccaggcatcgccgccggccagaacgccctgcacaacatccatgtagtcgttggagttggagaagtcggtgacggcaaagccttccatgccccactcaccgcgcaggatgttggtcagcaggttgtagtcgccgccggcccagacgcagccgatgcggttgaaggaagtcatgacgcagtaggcgttggcctcctccacggggtactcaaaggcctggaggtagatctcacgggcagcctgctcgttggtccagacgctgatgccgtcgcgggcggtctcctggtcgttgagggcgaagtgcttcatgtagacgtagacgcccttggactggatgccgctgacttcggcagcgcaggtcttgccggagatgaagggatcttcggagtagtactcgaagttacggccggagtagggagtgcgatggatgttgacgccgggtccgtaaatgccggagtacgccttgccgttggccagcaggcagtcattgcccatgctgcggcccaccgcctcagcgatggaggggtcgaaggtggccgccagcaggtcggcggaggtgtagctggtggaggaggaaccgccggtcagggtcgcagtgatgccctgggggccgttctcgtccttggtgaccggcttgttgacgctggccacgggagcggtgcagtggtacgcctggccgatgagcttggccatctcagagaaggtgacctgatccagcaggttgctccaggtgtactcggtgccgtccacggtgatgctgccgtccagcggcacgcccacgaactgggccagattcaggttgccctcggcgcccatggtgggcatctcggcagcgctctcggcggtggaaacgggaacgttctccaccgtggcgttcagagcggcgaccagctgatcgttggccgggatctggacagcggcgctgtaagaggtagcggtgatctgagcctggggcatggtgccggcccagtcgctgcggctgacgtagaccacgtcgttggaggtatcgtcgtccaccttgttcaggtcaccgtggtccagctggttggtgatggctgcgccggtggaagcggtggcgtaggtggtggtatccagggcagcctggttgtactggacagccagggcagcgttgccctcggaggtcatgcgggaagcatccacggtgccgttggcggtgtcacccagggcagccttggcggccaggatgttgttcagcgcgtcgtgagcgccgttgcctgcggcaaagtagtagttgcccgcatccacgatgtaggtctcggcgccgttggcgtcgtaggcgcgcatctcgctcttgtccacggtaacggtgacggtggcagtctcgccggcggggatgctgaccttggtgtagcccaccagctcgacggaggctttctccacgccgttttcacggtcatagtcggtgtagggggactgcatgtagatctgcaccacctcggaaccgtccacggcgccggtgttggtgacatccaccgtgaaggtgaaggtgtcgccctcctcctgcatggtcagcggaccataggagaaggtggtgtaggacaggccgtagccgaagggataggccacggtggaggcgtagtcatagtcgcccacgttggcgttgcccaggacgtagtcctcgtagcgggtctcgtagtagcggtagcccacgtagatgccttcctgatagacaacgtagtactcgttgttctccgcaaaggagaggcccgcttccgccgcgttggtgtaggaggtggcatgggcgttctggatggcgggggaggtcaggttgtcgtagcagtaggtgtcaaccagcttgccgctgggattgacggtgcccttgagcaggtcgccgatggcgttgatgccggtctggccgacctcgcccacccacaggcaggcgtcgatgccgtaatccacaccgcagatctcggggttgaggaagtccagctcaatggggttggtggcgttgagcagcaccacgatctttttgatctggccggcggctttcagttccgccagcttggccagcaggtcccgctcctcggtggagagggagaggatgttgccgtcgccgtcgccggagttgtaccagggcaggtcagcgccctcgccgcagatacggcccagcaccacgatggccgcgtcgccgtattccgcgacggaattccactcggtgtcggtgtagacgctctgggggacctcattgatgaggaactcggcgttgttgaagatgtagttgttcagcgaaccggaagcggtgaccaggccgtagctggagcccgcgccggtggtgtagaagtcccacatggtggggttgaccgagaagccgtcggcttccagggcgtccttcagcttggtggcgttggaagtatccatgccgccggaaccggtgccgccgtagacaaagtctgcgctggtggtgccgaacagggtgaccttggagccttccgccaggggcagggcgttgttgttattgagcagcagggtggcgccgttggccacgacgctctcgcagatctcggccgccgaagccgcctgatcctcgctggaggtgaagtccgcctcaaagtaggtctggccgggatcgccgatggtcttggtggactcggtccccaggaccatgttgatgatggaagcgtagttgttggcaatgggtccgccgatcatggtgacggcgaacagcaccacaaacacaacgctcaggattttccacagcagggaacctttggcctttgcgtttttctgtttcataaagattcctctcttttcgttcagccggatgcggtgcagcgggcgttgcgattactcgttgccggtgatgtccagggtgtccacagacatctcaacgatgcggtaggacagggtggtgtcgtccggggagagagaaggatcttccacggtcatggtgatctccttgccgtacttggccaggaagtcggcggaaccgtcctcactgccggcggggaaagccagggtggtcatggcgtcggtccagttggcggtgtccagcatcatgttggtggcgtagccgttgcggccgtaagccttgccgtgctgctcaaagtagatgcgggtgggggtggacagggtgatgtccacatgggtggcgtcgccgtcggcggaagcctcagaggtgtaagtgccgctgtaaatgatggtcttgttgcccttaacgccggggtcggtggtgccgaagatgtcgttcttgtagtagaggtcgtaggtattgtcggagttggtgaccagcatgatgtcgtcgctggagtaccaggcgatggaatccaggtaggtggcgttgctgatcatgtaggtggcgctgatctcgccgctgccgctggagctgcagccggtcatggagacagccataacagccgccagagcacctgcggccacggtctttgcaatattcgtacgagtcattgtgagtttcctccttctttttccggtcccgcaccttctgcggaactcctgtgactctatcttgtcaaaatgcacagttttgttcaacggataccgcgtaacccccggttttcacatcgtcttttggaaattcacctcgtaaacgggcgtccggcggcacggttcgggtggagttttccggtgtccaaagctcttttcgaccccggccattcggccgtccgcccgcccttcccctgcttttccccgcgcacttttgaacggttttccgtccgttttctctcatttcgttttccaagcccgccctcccccgcgggaacgaaacgggtcatatggctattttgcacaaattttacactcgtatttgtgcatattgaccaccgcttttgacatcaatcccggtttgacaatccccgccccgtttcatagaatcagaatagaagcggggcggcggctccgttaacaattttcaaacaaaacccaaacggcccgcaaatatttggcgggtacaatgcccttatcccggccgggcaggccggcatcccaggcaatacaagggaggaaacccatggtccatattcttgtggtggaggacgacgccaagctgaaccaggcggtctgcacctatctgaacgacagcggctttgcggccaccggctgcctgtcggcggccgccgcctatgaggagatgtacaacaccctctacgacctgatcatctccgacatcatgatgcccggggaggacggtttttcctttgccgagaccatccgccgggtgaaccggaccatccccatcctgttcatgtccgcccgggacgacatgagcgccaaacagaaaggctttcagctgggcatcgacgactacatggtcaagcccatcgagctggcggaactgctgctgcgggtgcgggccctgctgcgccgggcgaacattgagatggagcggcgcctgacggtgggcaacctgaccctggacgccgacgcagtcaccgccgtggcggacggggaggacattcccgtcaccacccgggagttcaacatcctgtacaagctgctgtcctaccccaacaagacctttacccgggcgcagctgatggacgagttctggggcatggagaccgagaccagcctgcgggcggtggacgtctacatcaccaagctgcgggacaaattttccggctgtgacggctttaccatcaagacggtgcggggcctgggctacaaggcggtgctgaaatgaaaaagcagagccgtttttcggacgagcgggtcaagaaagaactgtttcccctgcccatttttctgctgttcttcgggatgtttgccgtcctgaccactttgcagatgatgatcatcggccaggtcatcgactaccgcagcctgcccgccgccaacgtagcgggggttctggggttctgggtggcggcatcggcggcggtcactctaatcaccgggctgatcatccgccgccgttaccagaaacccatcgaagaattttccgaggctgcccgccgggtggcggcgggggatttttcagtgtatctgccgccccggcacaccatcgacaagcggacccacctggacgttctgtttgtggatttcaacaagatggtggaggaactgggcagcatcgagaccctgaaaaccgatttcttctccaacgtttcccacgaaatcaagacccccctggcggtcatccagaccaatgcggaactgctgcagaccggccatctgagcgaagcccagcgtcgggaatgcaccgacaccatcctgcaggccacccggcggctgtccaacctcatcaccaacatgctcaagctgaacaagctggaaaaacaggtcatccagcccatgccccagccctacgacctctgcgcccagctgtgcgcctgcgccctgcagtttgaggaccagtgggagcgcaagcacattgagtttgacgccgacctggaggaccgcgccacggtctgcgccgacgaaggtctgatggaactggtgtggaccaatttgctttccaacgccatcaagttcacgccggagggcggccgtgtcaccctgcgtcagacctccggcccggacggcgtcaccgtcgccgtgtcggacacgggctgcggcatggattcggggaccatggcaaaaattttcgacaaattctatcagggcgacacctcccacgccaccgagggcaacggccttggcctggcgctggtgcagcgcatcctggaactttcggacgggaccgtctcggtgaccagcaccccgggtaagggcagcaccttcaccgtgcgactcccgctcccccatgaggaggtaccggcatgacacaacagccttcccgcccgtacatcggctatgaatacaaggagatccccaccaccggaaaggacgcctccctcctgctggactgctacgaaagtttcggctgggtcccggacgaaaaccgcgcccccgcgccggggcggcagccctccgtggtctacctcaagcgggaccgcaagatcgtcaacaagatggagctgacccgccttcagcgcaatttcgagtcctgcatgcaggagatcaccatgctggaacagtccggccggcgcaccgccctcatgtgggcgcttctggtggggctggccggcaccgccttcatggcagggtcggtgtttgccgtcacctccaccccgccccgcatcctgctgaccatcctcctggccgtccccggatttgcgggatgggtgctgcccgtctttctctaccgctttctcctgcaaagccggacccgccgcacccgccccctcatcgacgccaaatatgaggaagtctatcagctgtgcgaaaaaggccacgccctgctgtgacctgcccgttcccggcaggcacagcggcttttccggcccgcagcacaaacaaaaccgcccggcacttttcagtaccgggcggtttttgtacagtcagtggtcgtttctgcgggttctgcggcggatgaacagcatcattccaagcgcggacaccgcgcacagcgccgcccagacggcgggcatggccgggtctcccgtggcgggcacaacgttctggaccggcgcggcggtgggttcagggggttgtgcggtactctgcgccgtggcggactgggtcggtgccggcgtggccggtgcgggcagggtgcagtcgttggtaaagacgatgttcgtcccgcccaggggcagcgtgacggtaagggtattgaccgcctccggtgcgccgccgttcagggtcaccgtggtgtcgtagtcatcctccggggtctcggtcacggtaaagaccgtccccggttccaggccctcaatgacaatgcgctccccatctttcagagtggtctcggcaacgcctttttcatcgaacatcagcccgccgtattccccgaacaggggctggcccgccgcgtcggtcagggtcagggtgaaacggaactccttgtcccggtctccccgagcgccggtgaccaccttctccaccgtaaggcgggtagggtcgttgcgcaaccgcacaatggtgctgcgggagaaaatattggtcaggttctgctgacccaggtcgatcttcaggtcctggtcgctgcctgcggcgtagttctgggtgatctccagccgggaccagccctcatccacaaggtagtataccggcccgccgggctgggtggggccgtattccaggatctggttgttgctgtaataggacaggtccagcggcgacaggccggagaaccgccagaccgacaggtcgttgccggtgccggggatatagtcgggcgcgatatacagcgcagccttgatgtcggtaagggtggcgttgatgtcgtcggggacggcaaactgcagcatactgcgcaccaccttgcccacgccacgcagcaccgacacgtcgtcgtccaccgttccggcattggcgtagacaccggtatcgtcgaccaccacttccaccagctcgtccgacggcgcatagccgtccggggccttggtctccttgagatagtaggtccccgcgggcagaacatcctgggtattgggaaacacccccgcgccgcccagtgtaatgatgtccccccggtcctggctctggtcccgggtggtcaccgtgtcgtagggctgcgccccggggttgacctgaccgtcggtcacgtcggaagcccgatacagggcgaactccgccccggtcagggtcttaagatcggattctcccaccttctggacgatgaggtaattcttgatattgggaacaaacaggcggacggagaattcccgttcaaaattgccgtcctctccggcggtatcggcgttcaggcggacggtgttgtccgcattggcgcccaaaagattggttgcggtggtgcggtaaaaggccacggtgtattcggcgttgtccgccgtcagatcgccgttggtggccagcacgtaataataggtcaggatatccccgggcaggttgtcgatggtcaccttgtaggcaccgctgctgtccagggtgaacagataggggttgaaccgggccgcctggatggccgcctccgtaccggtggtggaggagatctgccatcccgtgacggggtcgccgtagacggggtaccagtcgctctgggtgctgctgccgtcgccggaagcatcctgccgcttgagcaccaccgcaaagtagagcccggaatcggcggagtagatcgagccgtccacatcctccggctcatcgggcagggtgaccgtgaccaccgggctggcataagcgccggtgtcccacgggtttgcggacagcagcgtcgccaggttggggtaatcctccgggaaatacaggttcatctgcgggggcgcacggtagccctccgggacctggctttccaccagaacaaatttaccggtctggccatcgccgccgtactcatttttcaggttgttcagactgagcagggtgccgtccgggttctggaacacaaaatacccgttggggccggtggtaccggtggcgatgaggttcttcgggtcgtaggaatagtcgtcgttggcatagtagagctggaactctgcccccggcaccgggtccccgatctggtcgatcttgataaggtcgctctgggggatggacaccaggttgaatttcagcttcatgttggagtccacgttgccccgctccaggtaaaagaatttgagggtatggtaggtatcgtcggcaaaggtgtcggagccggggtttgtccaggtcttgcctgcggcctcaaacttttcccggatggtcccgttggccttgccgttgatttggacctggccggtctggaaattgatgttcagggacgccgcatcgtggatgccgcccaggtcccccaccagcacatcgtcgataaagacccacacatcgtcgtcaccggtaaactcataggtgacgggcgtgccgtccggggtaccttccaccgtgccgtagggctgctggacaaagcgggtggtcatggtgatgccgaaatagtggttgatggccgggttcttggagttcaggtccttcacctggctgaactgattgaaggggaagaactgtccccggggcgatacccctccggggttcacccccggcgcgttgtagacaataaaggaattggtgccggaatcgtactgggcaaagttctgggcactgtcatagtaataatagccctgggcgtcgatctgcaaaaggtcccgcaccccgggataggacgccttgccctggttgggcaggtcggggttgaacaggtaggccagggattccccgttctggctcaggaccgggtatccgttctgcagggtgtttttcacgatgccggtgcgggggttggcgctgccggtgtagttgttgatagcgttgggctggttgacggcgtttctcaaaaaccacaacagatgccccgcgttgatgccctggtccagattggccgggtccacattgtccggctcaaactgcccggtgatccagtagtcaaacaggttcagggtggtgccgatgggcgacaccgtgtcggtcaaaacatcgtcgttctgttccgccggggccgacggcgcagccagaacggccggaagcgccgtatccgccgtggccgcaagggcggcctccccctccccggcaataccttcggcccggggagcgggtatgcaccgtcccgcgccggaaaacagcagcacggacgccagcatcagcgcggccaggcgtccggcccatccttttgtatgtatgctcgtgttgcactccaccttccctttgcgtacggagcccgaaagccccgctctatgggtattataacagcgtaaattcttattttccatcagtttttgtcggtgtgttccgggttttggcgggcaaaaagccggccgcccggcaggcgcgcaagcgtctggccgggcggtcggctttacaaagggggaggggattttttgattgccgcaattatttcaggacgatggcctgggtcaggtggcggggagagtcggcgtcgatgttcttggccatggagatgtagtagcccaggaactggccgatgaagcccatcaccgcggcggcctgcagctcggtgtagccgttctcggtcttgatggtgtagtccaggtcggccatcttgtccacgttggggccgatggctgcggtcacaccgccaaagctcttcatctggctcatgagggaggcgtcggtctcctcggtatgctcgttggaaagcagcaccagcagggtgttctcgtccaccaggctcatggggccgtgacggtactccatgctatagtaggcttcgctgttggagatgcccatctccttcatcttgttcatgcactcgttgcccacgccgtagtaagcgccctggcccagggtgatgaacaggttgaggttgggatgctcggcgatgatctgcttggccagtgcgtcgctctgctccagcagtttctgagcctcggcggcatagttcttcatggcggcgatctcatccttcttgccagcggcatagaaggccaggatctgggccaggaacaccatggcggtgaagctgcgggtcatgatgacgctgtcctccggggtgttgggggccaggatgaaatgctcgttgtacttgctgctgtcggggtcgcaggtgatggccaggctggtgacgccgggcagggtgtggaccttgtcgatggccatgcggacctcggtggtgtagctcttgcgggtgatgggcaaaaccagggtgcgcttgcccttgatgtagttctcggggaagaagagcagctcactgcagggcaccgcggtggcagggacggagttggacgcctgccacaggtaggcggaagtctgcgccagatacagcgaggtgccgcagccggtgaagatcagctgatcgtaggactgggcgaacacttcgtccagggtcttttcaatgtcgggcagggtatccaggatggcctggaaagacgcaggctgaccgtagatttccttataagtgagagagctgttttccttcatgagaaatacctcctaaaaatgcttcaaccggtgatgacaagataacatcccacaacggccatgaacccgcagacgacctttttcaggccggcggcgctgagacggtcaaagagtttcagtccgcagaaggtcccgaccgccagtccgaccagcgccagggcgctccaggtcaggatctggccggtgacgtggcccatgaccacgtgggcggcaaaaatgtataccgtggaaaaaatgaagtaggtctgcagggtggcggcgtactcctccttggagcgggtggccgccagatagtaggccaccatgggcggcccgccgatgctcatcagtccgccgcacacgccgctgatggcccccgcggcaagcccggtccacaggtttgcccggatgaccagcctgctgctgaaaaagatgaagtaaatgctgagcactaccagtgtaatacccagaatgcggcgcagcaaggtctcggtgccggcatcctgaaaccagatgcccgccaggctgaacacgctgtttgccaccaacggccaccacagcagcttccagttgatgtggcggcggtatttgacggcgatccagagcaccatggccagggcggacagcacctccacgatggaggctgcctggaaggggatgaacagcggcaggatggacatgaccacgatggcatagccaaacccgctggccgactggacgaagctgcccgcaaaagctgccagcagaatgtacagcgccgtcatggcgatcaggctttgccggcggaaccggaaagctcgatgatcttcttgacgtcctcggccagggcgtcgctggcgtactggctcagcttccagctgtggccctggtggtccagcttctccagggcttcctggtagtgctgaacgtacttgtagcggatctcggtgccgaagttgatcttggcaacgcccagtttgatggcatccttgacgatgctctcctccatgccggtgcagccgtggaggaccaggggaatgtcagtgaacttgcggacgttttccagcacgtccaggtggatgtccggcttgcccttgtagtagccgtgggcgttgccgatgccgatggccagagtatccggctggcagagggacaggaactcgcggacctgctcggggtcggcaatgttcttgttttcctgcaccacgccgttgtccaggcgctgcagctcgccgatctcggcctccaccggcacgccgaagcacttggccaccttgatgacctcgttggtcatggcggcgttttcggcgatgggatgggtggagccgtcgatcatgacgctggtgaagcccagtttcagggcttccatgcagatgtcaaagtcggagccgtggtccagatggatggacaccggcacatccactttattggcgcaccacttggcgacttccacaaagaagtcgttgccggagtaagcgccggtggaaacgtaatgggccaggatcatggggctgcgcatttcctgcgcggccttgcagcaggcccggatgatgtcatagttgccgccctgggtattgatggcagggaccgcatacccttcacgggtggcgcgctgcatgacttccagattattggtcaacatggagaatcctccttctcttgtcagcaatgatcgttcacggggtagatgtcgcggccgtcgccccaggtcccggccaggccggcctgaccgccgcccttgaccggctcacgggagccgtcgatggccgggtccgcatatttcacgaaccagctgtccagggtgtggcgcatctccgcgatctccccggcacaggcggggtccgcgatgcggttatgctcctcgccggggtcggtgtccagacagtagaactcgtccggaccgtagggcagccgccgcacatacttgcgggtggcggtacggatcatccgcacggggccgtactcgtcaaacaccaccacgggccggtcctccggggcaggctctccccgcaggaagggggcaaagctgcggccgggcagctggtcggccagagggttgggcaggcccagatattccatcaatgtgggcaggaaatcgtaggcgctgaccatctgctcgcagacgagccccgccgggatctgcccggggtgccgtgccaaaaacggcacctgcaccgaggaatcgtacatattcatggggaaggtgccgttgcccttgccccagatgccgtgatgcccgcagttgaagccgttgtcactggtaaagatgaccagcgtatcctccgccaggccttccgcatccagccggtccagcagacggcccacattggcatccatggcggtgaccgccgcgaagtacccctgcaggttgggcacggggtccttgtagccgggcagcacgtccacgttggcccagggatgggcgggaccctgcgggcagctctcaaaggggcagtccttgtacaggtccacgtactcctggggatggcagcccacccaggggctgtggggagccgtgtagtgtacgctgagatagaagggcttttccttgtcacgctgatccaggaagcgcagcgcctcgtcggtgatgacgtcggtgatgtagcgttcctcgttcacaggcttgccgtcccggaacatgggggcgttgtagtagggtccgccgcctttctggtgggtgtaccagaaggagaagcctttctggggatgggcgccgtcgcccaggtgccattttccgctcagggcgcactcgtagccagcctcattgagcagatcggtgtagcctgtctggccttccaggtactgaatggcccgctggccgcagccgccgttgccctcgcacaggtagtcatgcacgccgtgctgggaggggatgcgcccggtcatcaggctggcgcgggccggagagcacaccggcgatgcgcagaagaaatgctcgaaccggcagccctgggccgccaggcggtccaggttgggggtccggatctcatggttgccgtagcagcccatggaccagacgccctggtcgtcggtaaggataaacaggatgttggggaatttccgttccggcatgttcatcatcctttcacggcgccggccacaaggcctttgaccatgtacttctggaagaagaagaacagcagcagcatggggatggtgccgacgatggaaatggtgttgatgagggaccagtcgtagctcagctcacccaggtagcgcagggcaatgccgatggacagggtgcgcaggctgtcggtctggatcagggtcgcggcgtggagatagtcgtcccaggccagcaggaaggagtagatgcctaccgccaggatgccgggcttgaccagaggcaccacgatgcggaacagcacgccgaagcggctggcgccgtcgatgcgggcggattcctccaccgccacggggacgctgtcaaagaagctgctcatcagcatgatggagaagggcagcatggccgcggtcagcgccagggtcaggccggcatgggtgttgatgagcttcatgccgcgcatcaggccgtacaagctgatcaagcggctgatcatggggaacatctgggcggacatgaacgccgccacgatccaggcgttccagcggaagtggaaccggctcagggcatagccgctgagcagcgccaccagcacggtcagtgccgcggacacgccggagatgatgaagttgtttttgtagtagatgaagaactcgttgttttcggtgaacagcttgatgtagctttccaccgtgggagcctggggcaggaagctgggcgggaaagcgtaggcttccatgttggtcttgaagctggtgatcagaacccagtacagcgggaacagcaggaacagaaggatcacagccaggacaaaatatttgagaatcgcactgagggtttgtctgcgtttcatcttgctcctcctttccttaatccatgggttccgctttgaagatcttgttgtaggcaaagaccaccaggatcatcagcagcatccacaccgtggtgaccgcagcgccgctgcccaggtcgttggagacgaaggcttcgcggtagctcaggatggccagggtggtggtggcgccgtcggggccgccgccggtcatggtccagaacagcgggaactgtttgaagttctcaatgatggacatgctcaccgtaactttgataacgctcatcatgtaggggatgacgatggaaacaaagcggcgcagggcgctggcgccgtctacggtggcggcctccagcatatcgctgggaacactctgcaggccggccagcaggagcagggtggtcagggggacctgcttccacaaggcggcaatgccgatgcccagcagggcggtgttggggttgttcaggatggcaaaatcagcgacggaaccgccggtgaccacctggaccaggtaacgcagcaggccgtactggggctgatacagccacagccagaccatgccggagatcatggtgggcacgacccagggcatcatcatgatgctgcgcaggaagcgggaaccgcggatcttgctgtccaggatgacagccaggataaagccgatcaaaaactgggagataaccaccgcgaacacaaacacaaaggtggtgatgatcgcgggcatcagcttgtcgttctggaacagcttgatgtagttttcaaagttgttccaggtacccggcgcaccgctgatgacatttttgatcttgtactcggtaaagctcttgataacagagtcgatgacaggcacaaggataaagacaaaagtgagcagaatcgcgggggccagcaggcccagcgaaaagatcttgtcgcctgtggccgacttgatgcggcgcgttgacgtcattgccttaggcatcggatcatccctttccgttctcattcataagacagggacaggagaatctgcggtcgctgttctcctgtcccccgtttgttcaggtgtttataacgtctttcaaatcatcctgccagaatggcgttggcagaggtctcaaagtctgcaatggcggtatccacatccttgtcgctgacggtaacagcctgggccagagtgcacagttccaggttgaagtcgttcagagcggcaaccagcgggacaggcttcgcctgggtggtagcgtccgcagagggagccagcagttcaggcatgcagtcggccatatcgttcttgaccgggtaggcaggggtgatgttgttcatgtagtcattgagcacctcgggggtgatgacgtactgcacgaactccttggcagcccaggcacgggcgccgccgttgttgaccataacgaagcagtgggactgcagggtgccggcgccgtcaccgtcgccgcccttcagaggcatggcgctggcggtgaagttggcggcatcggggttgatgctgctgacgccgttgaagccccagctctgatcgtagtacatggccagctggcccagagcgaacaggttgcgcagatccttgggtttgcagttctgggggttgtagcccttgtcgtccagcagcttgatcatgtcgaaagcctgcttgaagccgtcgtcaatggccagggagccgtcctcggtcaggacagtgccgccgtagttgtagaccacgctgttcaggaaggaaccgacgaccgcaacggatgcagtgggaacaccgaaagcgtagatcttgttgccgtcggcggtggtcatgccgtcgatcttctcggccatctggagcatctcgtcataggtcgtgggcggggtgttggggtccaggcccgcagcctcaaagatgtccttgttgtagtacagaacgcaggaagatgcgtacaggggcacgccgtaggtctggccgtccacctggtgggcttccagaacgttggggtagaagtctgccaggaagtctgcatccagcatttcctcagcgggagcggccaggccggcttccacgaaggtggggatccagatcagctcactgaaaatgacgtccaccatgtcaccgccgccggccatattgatgacctggttggtgatctcgccgtaaggagcggtgacccactcgatggtaacgttggggtacttctcctcaaaaccggccttgacgccctcccagaactcggtgtagccgctttccaggatcgcgtagttggcgactttcagggtaacttcctcggtgtactcctcctgggaagcgccgccggtctcaccggtgccggacgtctgagagccgctggcggtatccgtgccgccggaacaggcggtcatgctgaacgccatggctgcggccagggctgccgcggtcagtttcatgtgctttttcatttgtgttcctcctttgtaatggtcgcatatccgaactcccccgttgccgggcggagtgaatccacgagtagtttacacgtgtgtacatcctctcaaaaatttaccgccgtttttctgttccccggatacaaaatacatcgttgggtaagcggcggttcggaagaggtacattcgtgtgtactctcagggcaagaaaagctcgcatgtcatccctgccgcttatcacggcgtttcaccatccaaaggcctaagctggtgagatcctgccgggatgtacacacgagttttgtcctcgttgtctcaattataccgattcctgcccctgccgtcaataacttttggtatttttgtcgcaactcacaaatccgctttgtccctttgggcaaaaaacacaacagacttggggccatggcctgctcaaacgggcaatttcaacgattggccgtgtccccgcccctttttccggcaaagtttctcccctgccggggcataaaaaaaacgggcggccttggggactcctcccaaagccgtccggctattctgtattgtgtgtctgccaccggggcgcggttcaggcgctttccctgcggatcaggcgggtgtggaattcctgtggtgcggggacctcgccgccgttgagcatctgatccagcatatccaccgctgctttgccgatggggtcgcgctggatctcaatgctggtcatggtgggacgcatatactggctcaggctggaattgtcaaagcccaccaccgcaatgtcctggggcacccgcaggccgatgtccatgaccgcctgcatggcaatgcaggccaccttgtcgctgcggctcaggatggcatccaccggatggctgcggcagtattctgccacggcatgggccgtctgggcggggtcgatgcacccggtaataacgtgggtgggcaggccccgggcctccatctcgtcaaaatatccgtgcagacggtagtcgctgcggtcgctgaaatgcccccggcccgaaaaacggtccacataaatgatatgtttgcggccctgctccgcgaggtagctcacgccgtcccgggcaccgccgtacaggcccgtctggatgatcgccgcacctgacaggtcctgatagtcacggttctgcagcaccaccaccgggatacttacatcgatgaaccggcggatataggattccgggatgctcatcgaactgacgatgatgccgtcgcactggcggctgatgatctgctccacaaaatcatcgttgttccggttggagatcaagctgatgagatagcccttgtcataggcatagtggtccatcacggcgatcagctggctgaaatgctcggtgctgatgttgtccgcgatgaatacgatatgattggtctttttccctttcagcgcacgggcgatgctgttggggtggtagttgagctccttcaccgcctgcaaaacgcgctcccgcttgttcttgtccacatagcggttgttgttcaatacataagagacgatcgtttcgctcacgccggcccgctgggcgacgtcttttctggtaaccatccctctggtcattttttgcctgctccttcgcaaattttggcctttgttagctatagtatatcacacttttcttcgccccggcaactcgtttttgccgttcccccgccggaaacccgcacagctttggcgttttgccgaatctttttgttcttttttgtcggggcatccaaatctgttcattttgcccgctgcgcctttgacacgcccctccggacggtctataattgtagcaacaaggttatacacacgtgtttattatccagtattctttactgtatctgccgtcatatgaaaaaggagtgacttgaacatggtaaaagcaaaattgaacgtcggctttgtggccaccctgtccggccgttggccccgtgagcgcccgcagaagctgcagacgctgtacggcgactgggccgagcgtgagctgaccggcgtcaacgtggtacgctatcccgagatcgtcaccaacaccgacgaagccgccgcctgcgcggactacctgcgggctcaccaggtggacgtggtgctgctggtgatcggcgccttcaccggcgacgacgtgggctgcaagctgtcccaggaactgggcaagcccatcctgctgtgggccacccacgaggctccctttgttcgccaggagcggctgtgggccaacgccatgtgcggcgccatgatgaacaacgccgccatcaagcgcatcggcggcgagtgctaccctgtctacggcgacatggacgaaccggaagtctgcgcccaggtcaagaccctcatcaccgctttctctgccaaaaagaagctggccaacaccagcctgggcctgctgggctaccgtcccacggccttctacaactgctcgtttgatgaaatgaccatccgccgcctgttcggcatccgcatggaaggcaccgagctgaagctagtctttgaccgcatggcccagctggacgccggcgccgtccatgccgacatggacaaggtccgcaccgatttcggtctggacaagctgccccgcctgcctgacgaggaccgcaacctgtccgaggaaaatctggaaaaccacagccgcacctacctggcgctgaaagaaatgatccccgagttcggctatgactactgcaccatcaagtgctggcccgagatgggcgccgtcaagtgccagccctgcggcgtgctcagccgactggccgacgacggcatcagcgtcatctgcgagggtgacgtggacgccggcatcggcaccatcatcgagcgggaaatgaccggccagcccacctttgtggccgacatgatcaacatggacaagcaggccaacaccctgactttctggcactgcggcaatgcgcctctcagcctgtacgacatgtccgacggcctggaactgcgcaaccatcccctcatcggcaacggcagcgccttctggggcgtgctcaagccgggcaaggtcacggtggtccgcgccagcgtcattgacgggcagtatcatctggtcgtcctgcggggcgaggctgtccccaccaagcgcaacacccgcggcaccatggtcaacgtccgggtccagcgcccggtggaggaagtcgcccgggatatcttcgacaagggcatcgcccatcattacagcctggtctgggatgacatcggcgacgccgtggtccagctgggccgcatcctgcacattcccgtcatcgaactgtaaaggaggagcaacgtcatgtccaacgcactgatcgtccacggcggcgcccccaccgccgtcatcaacgcctcgctctacggcgcggtgaccgaagcccgcaaacatcccgagatcgagcatttctacgccgccatcggcgggtccggcgccgtgctcaaagagcatttcctggacctgttcacttcctcggaggcggagctggagcttttgctccacacccccggcagcgccatcggcaccagccgtgacccgctggagaccgaggactatgaccagatggcccaggtcattgcccgccacaacatccggtatgtctttttcaccggcggcaacggcagcatggacacctgcggcaaggtgtaccaggcctgctgccgggccggcgttgacgtgaatgtcgtgggcatccccaagaccatcgacaacgacatttctgtcaccgaccacgcccccggctttgccagcgcggcccggtacattgccgagaccaccgccgagatcagccaggacgtccgcggcctgcccatccacgtctgcgtcatcgaggccatgggccgcaacgcgggctggatcgccgcggcctcggccctggcacgcagcggcgacggcgacggccccgacctgatctacctgcccgaagtcccctttgacgaggatgctttcctggccgaggtggagcgcctgcaccgtgaaaaaggcggtgtggtggtggtcgccagcgagggcctgcgcaaagccgacggcgagcccatcgtggagcccatcttccaggtaggccgtgcggtgtactacggcgacgtgtccgcccatctggccaacctggtcatccgcaagctgggcatcaaggcccgcagcgagaaacccggcattgccgggcgtgccagcgcggcctatcagtcccgcctggaccgtgacgaggccgtggaggcgggcagcaccgccgtgcgcgccgccgtggaaggcaaaaacggcgtcatggtgggcttccgccgcctgcccggggaggaataccgggccgagaccatcctgatccccatcgaggaggtcatgctccacgagcgcaccatgcccaaggagttcattgccgaaaacggccacgacgtcacccaggccttcatcgactggtgccgtcccctgctgggcgagccggtgcgcaagtatgtgaccttcaagaacaaaccgctttcgaccgactgatctgcctttctcttttgcgccatacaacaaagccgggcggctcctttccccgtggggaggagccgcccggcttttctgtcatattgggttgtgcgggggtcaggcgcggtagacgatctcgccgcccaccaccgtggctgcgacctgcaattcgtcgtccagcagtacaaagtcgccgtccttgcccggttccagccgtcccttgtccggcaggccgatgagatcggcggggttctcggtgagcagggggatgagctgttccagggtgtaggaggtaaaggatttcaggttgcgcagggccaggtccatggtcagggtgctgcctgcgcggccgccgccgttggccagctgcgcgtcgccgttgaccaccaccacgtcgttgacgcccagcttgtagttgccgtcgggcaggcccgcggcctggatgctgtcggtgatggcaaccacacggtccagacccttgcagcgcaaaagcatttccaccgtgccggggtgcaggtggcggccgtcgcagatggcctcgcagtaaacatcggggctggccagcaccgcgcccatgatggcgggctcatgctggtggaacagccgcatgccgttgaaggtgtgggtgcaggctttggcgccgttggcgatggcctgctccgccgtgcggtagtccgccccggaatgtccgatggcaatggtgaattccccggagaactcccgcacgatgtcctggacgccctccacctcgggggcaacggtcatgtaacggatggctccgcccgcctcctgctggcagcggcgcacccaggcggcgtcccccttgcgcagcagggattccggcatggcccccttgtagtccggggacaggaacggcccttccagatggatgcccagcacctgcgcgccgccggtgggctgctgcatggcctgggtaatgcgggagatggccagggaggtctgttcctccgtgtcggtaaggacgctggtcaggaaaccggtggtgccgtggctggcaaaaaaggccgccagggtgcggatgtcctccggcgtggccgcgttcacgtccacattgcagccgccgtgggtgtgcacgtccagaaatcccggcaggcactttttgccctgggcatccagcaccggcacgtcggcgctcaggtcgggggcgatggcctcgatcttgccgtcgcggatgagaaggtcggcaggttcaaaccgatgatcccggtacacctgtgcgtttttgagcagtaaattcacaagattccctccttattgcagaaaccatggaaaaatcacgggtaataaaatgcagctcttatacacaccagtgtacattttgttttttgcgctgtcaatcggaaaaagcgccaaaaaacgcacgatttttttgccgtcccctccgcccggggccatgcgggatcataagggccgggactgtgcccaaccggaaagaagcgtgcaaaggcaaccggtgctgccctcctgcggcagcgccgcggcctgaccgcgtgtccgggtctcccgcacgttcttccgaaccgggtcagccgtcaggcccctgcggggaaaaaatctccgaatcgaaaattcctacctcgtctttacattctgtaatattccaccccagaatcatcactgatttctgagcataagtcaaaagggagctttccttacccggaaggctctcttttgctgataaaacagctttttccgctcatatgccgcagctgatacaactccgataaaagcggcatccacaatgagaaccggagcactctgtttttccgccgcgccccggggtgcggcgggccagccgcaggatgaagaagggggacacgggtcatgatccaaaacgtcaaaaaggaggccgccgcactgtcggtgctggtcgggctgggcggcatcttcctgtatctcaaccggatcacacctctggttgccgacgactatttctatgcctgccgcctggactatgcccaggacggcaccttgctcccggtcagccggctgcaggggctttgggatattctgctctcccagaaatgcgtttacatggcccacagcgggcggatcccggtgctggccagcgttcagcttttcacgctggctccggagctgctgttcgactgctgcaacgtcctggtctttctgcttcttctgctgatgatgacacggctggcccggccggattccgcgggcaaaaaggcagcgaccctgatgtgcgctgggcttctgatctggcattgcacccccgcctttgggcaggatcttctctggcataccggggccataaactacctctggaccatgacggcgacgctggcctttctgctgcaatgcctgcagccgcatccaaggctgggggcgccgggcgctttcgggctggggcttgtctccggctggagcatggaaaaccagtccgccacagcctgctgtctgtgccttttctgtctgttccgccgcctgcgccgggaacaccgcgtcccgaaagcactcgccgccgggaccgcgggacagctgctgggctttgccctgctgatgctggcccccggcaactaccgccgcagcgccggctacggtcagaccggcctgttctccgccgaaatgctctcccgcgcggtacagtacaccaaagccctctggaatgagttctccgtcctgatcgtgctgacctccgccctgcttctgctggtgctgctgaccgcccccggcagggccgcccgccccctctggctggcgggcggcgcggtgttgtgccatctttccatgacggcctcgcccgcctatcccctgcgcagcatgttcggctttgaaatttttacccttacggcatttcttgcctgcctcaatgccctggaccggcggaagctccttttgcccctgctgtgcgtgctgctgggcgtctctgcggcggcggactttcccggggcggccgcagacctgtcccgcctgtataccgtcacggagggccgtgcccggtatatcctggaacagcgcgcccggggcatccgggacatcaccgtccccgtggcgtcggcggacacccggttcaatcctctgtggggcgacgctctttccgatctcatgcaggacccggccaacgagcgcaatcgggcgctggccctgtattacgatgtggacatcatccggggcgacccggaactctgagcgtcccccctgccccgcggcacggttttccgcgatacttcttggatacaacctcctgttatcatgctttcagcccggccgggcaaagtcttttcttttgccatctttcaggaggtgtatcttgatgaatctgtcccccaagtatccggcagcccttgccggaatgctcttgtgttttgcctgcctgctcggtgcctgcaccgctcctgcccggaactccggcaggtcggatgccgcgcccccctccggcggcgacgcatccccggagccgtcctcctcttccgaaagcgcggagcccaccgccaccgggttcactaccctgacccgcgaacaatattccatcctcgggtgcggcagcgaacagggctattatgagacgacctatgacgaatccgccggcactcacatttactatatcgactacgcatcccagcaggaagtttatctctgcgccgcccccaactgcagccatgaccgggagggctgtaccgcctggatcgatccggcggaaggcaactatgttcccctggtaagcggggagcacctgctgctggttcacatcacctacgggatcgaggccccggagcgggcgatcccccatattgacatggccaacctggacggcagtgaccgccatacactggtaaactttgccgccaacgagcggctgaaaacggtgtttgccgtcaacggtgaccagctggtctgcgccctgaacgtggtcaacgccgaggatctggaggacaccaacgccaccctcaaactggtcctcatcgacctgaacaccggggaacggacggatttctatgagcgcgccgtccagatcggcggcgccgagccggtttttatgggcgtcacgaataacggctactgcattttgcgggagcaaaccaccaccaaatcggaggaggatttttccgggcaggaatggagcgacgccgcaaaggagctccagcgttccacccagtacacctgcaccgcgatcccggtcggccgggcacagccggcggggacgttcacctacagcggccggatctatgatctgctgtgcagtgacggtctgtactgttttgactgcgacagccgcaaggtgacgcggatctcagtgcccgacggcacggcggcagagcttgccacgctgcccgatgtaggggccgaatcggcatacctggacggcaagctgggggactggtttttgctgtcccagcgatattacgagacccgggatgacgtgtcctatcccgttgccaacgattgctgctacgccgtcaatgtacagaccggagagctgcgggagctgaccatccgccaggaggtgggtgccgaccgccgcatggccaccatgctggcacagaccgcggcgaacgtgctgctcatcaccgacagcgatgtgccggagaccgcctaccattacggataccgctacgcgctcatatcccaggaggattacctcaactcccatgccgacgccctgcgcaccgtttcctttattttctgaccgtccctcaaaagccctgattcctgcgctcccgcacaaaaacgccttgccggaaagcaaggcgcttttttgctgcgggttgcgggaacctccaatcagaaaaggcatcggagaactctgtaaaatccgcccgttttcccggcccccgtacagacaagctccccaggctgccgatcttgggagcctgagcctgccgcagtttttgtttgccccacccggcaaaacccgctatactggaaccaaaacccgctgtgggaggggtacgcatgaacattctgctgctggaagacgacaccgccattgccgcggcgctggaaacttttttgacggaaaaaggctgccgggtcacctgctgtgactccctttcccaggcacggagcctgctggagaccgccctgcccgacgtggccgtactggactggaatctgcccgacggggaaggcacagacctttgccaggaactgcggcagcgctggccccgtctgccgcttcttctgctgacggtgcgcagcgataccccggatattctggccgggttcgattgcggcgccgatgattatgtgaccaagccctttgaccgcgaggtactgtacgcccggctgctggccctgtggcggcgcaaccgctccgatgccggggaaatgctgtgctgcggggacatccggctggacccggcccgccaagacgtcacctggcagggagggccggtcgccctggccccgctggaataccagctgctttatctgctgttacaaaacaaaggccgcaccatgacccggcagcagctgctgaacgccctgtgggaccgcaacggccacttcgtcaatgacaacaccctcaccgtgaccatgaaacggctgcgggaaaaactgggccgccccgcctgcctgaaaacggtgcgcagcttcggctaccgactggaggaaccccaatcatgaatcgtctttctctgcgccgcatggtttttccggcggtttgtctgctggcagtcgccctctccatggcgctgctggctttctggtccgcggcccggcagatggctctgctggacggcttctgcaccgccctgatcgcccgttcccccgagaccgccgacaccgtctatgctcttgtcaaggaaggggccttttccgcacggacctctcccggcgtcctggcggaactgggttaccgcccccgggatttttccaccggcaccgggtggctgtatgctgcggccgggatcggtctggcactgggcggcactctgctgggcatcgcctttttcctgtcccgccgggccgccagcaggcagatgcaggagctcatccgcctgctggaacgtgcacgcgccgggcaacccatgcccctgctcaccggggaaggaattcccggtgacagctatgcccggctggccgatgagatccagaaaaccgtcaccgagctgttcctcacccgggaggctgcgctgaccgcccgggaccgctttgccaaaaaccttgccaacatcgcccatcagctgaaaacgcccctgaccgccctgtccctggcggcccagaacgccggtgctgccggccgttccatggctggtccgctggcccggctcaccgggctggaggagtccctgctgttgctagcccgtctggacaccggggtcctgcccctgcagccccggcccaccgacctctataccctgctgatgatcgcggcggacgatctgcaatccctgactgagaccgccgggatcaccctggacattccggaactggcccccatcacggtgacctgtgacccggactggacggcggaagctctgatgaacctgatgaagaattgtgtggaacacactcccgcaggcggggccgtccgctgtacctgccattgcagcgccctctgcaccgaggtcatttttcaggatacggggaccggattttcccaaaaggatctggcccacctgttcgagcgcttttaccgcggagaccatgccggccccgacagcaccgggctggggcttgccatcgccaaagaattgctggaacggcaaaacgtgctgatccatgccgaaaacgccctcgacggcggcgggcgatttgtggtgcggttttacggctaactgtcaccgggatgtcaccttgcggtggtagaatggagaaccaaaggaggatgttccatggaactgctgcaatgtaccggactgaaaaaagtctacggcaagggtgagaccgccgtctgtgccctgaacggcatcgacctgacggtgacccggggagaattcgtggcggtggcaggggcttccggctcgggcaaatccaccctgctgcatatgctggccggtgtggacaagcccaccgtcgggcaggtgctcatcgacggagtggacgtagggacgctggaccctacccgggccgccctgttccgccgccgcaaggtcgggctgatctatcagtttttcaacctcatccccaccctgtcggtggagaaaaacattgccctgcctctgctgctggacaaacggaaacccgatcccgctttctttgaccagctgatccggacgctgggcctggagggcaaacgccgcgccctgccggaacagctttccggcgggcagcagcagcgggtcgccattgcccgggcgctctgttaccgtcctgccctgctgctggcggacgagcccaccggcaatctggaccggaaaaacagcgacgagattctggacctgctcacgctctgccaccggaattgggggcagaccatcctgctggtgactcacgatgaacacctggctgcccaggcagaccgggtcatcaccctcagcgacgggcggatcgtcagtgaccgctcacgggggtaagcgctatgtggaagcacttttcccgcagcgacctggcccacacccctgccgccgtccggaccatggcgctggcggccctggcggcctccttctttctgtccttgctctgcggccttttctataacgcctggacttatgagattgaccgcatagtacgggaggaagggaactggcaggcccgtctgaccctgaccggcggagaatgggaggaaacgctggagacactggaacagtttgcccaggtggacaccgtcacccgcaacgaaaccctgtccgggccggagattttggtggtggacctgaccttccgggacaaagccgccgtatatgacacgctggcacgcatccgggaccgtctggacctgaccccggaccagacccagacccacgacactcttctctcccgctatctgatcaccgatccccttgaccccgacccgcccctgctcctgcctttcctgctaggggtatggggtgtgacagccctggccctggtactgctgctgcgcaacgcttttgagctcaccatgcaggcacggctgcaccggctgggcattctggccagcgtgggcgccacgccccgccagcttcgcctctgcctgttgcaggaggccgccgcggtctctctgctcccgctggcagcaggcactctgctgggctttgccgcctgccgcggggtgctggcagcggtcaaccgggccgctgctggtctgcccgaccgccagccggcggtgttttccctccatcccgccgtggctgcggctgcactgctctccgctctgttcaccgtcctgctttccgcctggctgcccgcccgccggctctgccgcattgcgccgctggaagcgctgcggggcaatctccggccggagcccgggcggttcggaaagccctccctcaccacccgcctgctggggcggtgtttcggtatccggggcgagctggcgggcaacgccttacgtgctcagaaaaagtccctgcgcatcgccaatgcttcgctgctcctttcctttttggccttcaccgccatgctctgctttttcaccctgtcgggcatcagcacccgcatgacctattttgaacggtatcaggatgcctgggacgtgatggcgtccctgccgggcacccgcctttcggacttttccctcaccgattccctggccggcctgcccggcgtggaggactgcgtagcctacgaaaaacagcaggcgaacgtcctgctgcctgccgaagcccaaagccaagagcttcaggatctgggcggtctgggggcactggccggggagtccgtctctgccatatccggcggttggctggtggatgcacccctggtgatcctggacgattccgcttttctccggttctgtgaagagtccggccttcccccctccctggacggagcagtgctgctcaaccgggtgtgggacagcctgcacagcaatttccgcaacagacagtatctgccctttgtacagccggacaccgccgctctcaccctggcggatggggacggcgccgcactgggagaactgcctttgctgggtctgacagacaccccgcccaacctgcgggaagaatatgattcgtacaccctggtcctgttctgttcccagagcctgtgggcggcctgggcgaagcaaaacagcattcccgcctcggcgcaggagccggaagttctggtacgtctgctgggtccggaaaacatttcgcaggcggaatgcgaagcccttcaggaggaggtctccaccttgctggagggcgccgggtatgtctgcactgtggaaaaccggctgaccgagcgcgccaccaatgaccggatgatccggggcgccgagagtattctgggtgctttctgcctgctgctggctgccattgggctggccaatgtctttctcaatacgctgggctttgtggcccagcgccgccgggaatttgcccggtatctctccctgggcatgacgccccgggaactgcgcagccttttctggatggaaggtgcggtcctggcactccgtccgctggtcatcactctgccccttactgccggaatggtcgccttcatgctgaaggccagctacctggacccgtccctgtttctcgccgaagcgccggttttgcccgttgctcttttcgccttggggatcgtcctctttgtggcgctggcctatgcgctgtgcgcccgccgggtcctttcctccgacctgacggaactcctcaaagacgacagcctgctgtaatcaacggccgcaggcccgctgtaaagcgggcctgctttttttcactttccatccccggacatcaaaaaaaggcggcatttctgccgccatattttaccgttctccgacgctgtccggtccgcacactgccgaaaatagatcccggtaactataaggcatgcctgccctgcctccgcgttgccagggcgcgccccataaaagtcacttttcccctgcccgcatggcctgttcatattcgccacagacggcatcagcgggaccgtcggctctcttgtttccgtggtccagccagatggcgcggctgcacagacggcgcaccgcgtcggaatcgtggctgacaaacagcagtgtggtgccgtcggccagcatgccttccagacgctgcatgcacttttgctggaacataaagtcccctaccgccagcacctcatccaccaccagcaggtcggccttgacctcggtggcgatggcaaagcccaggcgggccaccataccggaggagaagttcttcaccggaacgtcaataaagtcgcgcagctcggcaaagtcgatgatgctttcgaaatgttcgttcatgtaggttcggtcgtagcccagaacggcgccattgaggaaaatgttttcccgtgccgtcaggtccatatcaaagccggcgcccagttcgatcatgggagcaatgctgccgttgacctgacagcttccggtgctgggatacatgacgccggcaatgaccttgagcatggtgctcttgccgctgccgttgcggccgatcagggccaccgcctcaccgcgattcacctggaagctcacgtttttcagcgcgtaaaattcgttgaacatcaatttgcctttcagcagcttgaccatgtactctttcaaggtttctgttttttcctgtgcaaggttgaaacgcatcgatacatcattgacctgcaccagcggagccgccttctgatccatggttttccctccttaaatgtacaggataaagttgcgctgcagcttgcggaataccagcaaaccgatggccagcatgccaaacccggataccgcacaggcgatccaggtgttggggccgggaatattgccgtacatgaccagattgcggaacaggttgatgtaatggtacatgggattgaatttcatcaggtgctgcgcaaagccgggaagctgttccagcgggtaaaagatgggggtcgcatacatccagcccagggtcagcacgctgaacagatgctgcatatcccggaaatagaccgtcagagcggacagtgccagcgcaatgccgcagcagaacagcagttcaaagaccagcggcacccagaacagcaggatcgtccagtgcagcggcgagccggtgaacagcatgaccagcaaaaccgccgccagactgaaactcatggtaacaaaactggaggtcacccggctgatggggaaaataaatttggggatatagacttttttgatcagcggtgcgttgccgatgatggaggtcaggcccatgttggcgctctcgttgaagaaggtgaacagcgtgttgccgcagatcaggtagagcggatagttgggaatgtcgttacggaacatgaagctgaaaataatggtctgcaataccatcatcagcagcgggttcaggatgctccacacatatcccaggaagctgcggcggtatttgaccttcaggtcacgggagaccagctcccggatgagcggctgatacttgacaaaatgctgccagtagcgggacagctgggagggtttgttggacatatgcggcttaagtctccttataacaatttagaacggcacagcagatccttatctgcggaaaaaatgtgccacgcggcgcagcgcatgatagcatcctccgccgactttcagtaaggccggatggtcatgcagctttcgctttgccgtatctttcaggattttgcggtccaccagaagccagaccagccattttttaggcttgctcatggaatagtaatccagcctgtcatcccagccatctctatttcctctgccgttacgggactgcagtgcatccagatctccttgccaagcatcgcggattgtgacccgtccaccattccacatttcatcctcaaaaggaatcgcgttgaacagatcggcatctgccgagcaaggataatgcaggaaatactccatcggccagcttgcatccatccgccgggcacagatccgcttcaaatcgttaccaaagatagcaaccatatctttcacgtactgtagcgcagcgttctgcaactgtgtagtaacataagccgcagaaaaagatgttttgtaatcttcaaatacaggaatcgcccggccatctatgcagtcgaatccagtacaggaggggccttgacaactgatactatattctcgcagagccgtagtcgctgccggtttgtaatcataaaaagtgtaataccgaagcccagtcacataagcgcgcaaatctgcaatttcgctgtttgtatgcagataacagggtgtcacatcaaacccgaagagcctcttgaataccacctcaaaccgacaactgtacccgatatcaaaagatcctgcttttcctctgaacatcggtgcataataccgctttacttgttcactgtaccgcaggacgagtgctttatcgtagcaatgttccataaacaatgcaagaaatttttcaaaatcggcattgctgccaaatggggcattccaagccactttctgctgttcagcagcctgtttcaggcgtcgaattccttcttgagtacatacgtttttaacaagaccgacaaactgagacggtttgaacgactgcatattgtagctgctccacggtatggtcgtcaaacattctggcgttgtcagcagcaacggcatcacggttttacgtgagacatagatgtaatcggaaggcaaattttccaatccataaatacctttcaccgcctcaaaggcctgcataggcagccagccgtcccgtgccacaaaattcatccggtcgaagttttcgtcccggcagagttcggccaaccattgagctatcgcaagaagataaggtcctgccgcatagtagccgattcgccctgggtcaacattgaaatcactctcctgagcactcggaataaacggatcatcatacaatctgttggcgaccaccgccagccggcaacgcataccgaagaaggcttcaaacccattggaagtcagtcggattccggagttatttcggtaaaggcgattgaacagcgaaccgaactgatatccgtggaccttattttccatacagtcggaaaccttaggcagatagaaagccttccatccatattctcgcgcttttttcacatctgcttccaggttgtctccaatatggacgaacgccgatggtttacagccaagttcctgctgtacccgacgataaagcaatcccccgcgtttgtgggcccccacctccccggaaacaaaaatacgttcaattccggtgtacccacatcgagccagcatctgcccgatgatctcggaggaaaggtacatatccgaaacacagataactttcttccccaggtcttgcgcaaattccactatttcctttgcagtttttcgcggagagcaaaaacgcaattcgcagtcaatctccagctgctcgatttgatccgcataaggttccaactgagggcaaatgcggcaaagtgattgatagatttcatccaaggtcacttcaccggcactgtttttgttactgcccaccgcatactgtcgggccaggtattccgcttctctgcgcaatccttgaaaccgtacactatctacggtgcccagtatttttgtgacatcaggttccataaaagtaaacaaatcggtggggaaccaaaaaggtctcaagatcagtgtgtcaaacacgtcaaaactgacatactcacattctgcttttctgatagcttgcttgatatcttgcaacggagtaccgtccattttgacagacacaaacgcaatttcctgagactggcatttttcttcctgctctgtgggggacatagcttcgatttgtttaagtaatgttcgttttgctgcacgagaaccgtcaatctgttgtttgataacgcatttccagccttttaacagcctgtacttccattctttcaatccttggaaacatacctcgtctgcctgagcagacaccagatacatttctgcatatcgaaaaaccgttgcaatatcctgaattgcattcctgcatttttcgatgtttgcgtttttaatagatgtcgccgcaccctcatgccggaagtaataataatattcgccatgtacatttcgcatggctgttgcactgccaaacagcaatacagaatacaaaacatcttcgcacatagtaaaatgtgtactgatattctgcaaaaacggtgcgatccttgtatacaaactataactgtaaatcttattccaaacgacatgacagccgtaatcctgcccggcctgccgcatcaggaaatccagaatttccgggcctttcaaatccagatccgtctgctgaaaaatccggttgggataatacatttcaccggattccatcacctcaacgaaatcgccggccaccaaatccgcaccggtggccatagcttttttgatcatgggacgatagtagtccagggtaaccgtatcgtcactgtccaggaaagcaaaataatcaccggtcatcgcctgcatgcctgtaatccgcgcacggaacagtccacggttctccggatgatgcagaatgcggataaagggataacgctcagcatagtcctgcgcaattttcattgcgtgatccggggtacagtcgtccacaatcaggacttccaagttttcccaactttgtcccacaacactgtcaagacaatctgccagatatttttccgtattataaaccggaataataatactcagtttcggattcttcatatagccattctccatctttttggatatcccgaatcaattttgcaatttctgtttttcatgtgcatggcgctgcaggaccccgtatagcttatatccactgaatcgcaggagccgcgtatttttgttatgcatctgccgcgcgatggccggatggtcgtttctcacagctttgtcgtacgttgccagttgctgtttcactttcctgccgggctcaaacctcagcagcagttcaattccgtattgggcaatatctctggcccggctccgcagcaggtcgcctttgattccgccgggcagggcatcggccaggtccaggatctgttccgtcaccctcgcataatcctcaaaatgtttctggtaattttcaatgcttacgctctgtccgtctctccccagccggtaatggtacagggtcaccgggcagaaagacatggtctgcgcggcactcatggccataaaagtgtaagccatatccgtgtagctgcaatgggtcagcagccggatgttcgccgcgcgaagcatgagcgtacggcaggtcatgccgtggatttccaggtccagcgcccgctggcccagcatgtcataggtatacgtactttgtgtttcgtaccctttgcagatgtcaaacacgttttgcacctgctcttcgcggaccgtgcagtaattggaaaacacaatatctgtaccgcagttttccagatattgcagcatggtttccagtgcagcggtatcaaaccagtcatcacagtccaatgtgcggaaatactctccgcgggcattcgccagtcctgtcattacggcactgccgtatccgccgttgggctgccggatcacccggaaagtctccggccaccgtgcagcgtatcgctcggctgtcgcagcagtctgatcggtcgatccgtcatccaccacaatgacgtccagccgttctccctcccgcaccaggcaggactcaagtgctttggtcagtgttttttctccgttgtaagccgcgatcaaaactgtcaaaattttccctgttcgggtctcccacatcccccgatttgccattttgagtgtctcctccagtctgcagcacttttcacgtttttgtgtatggagctcaaacgcgtttcgtcactatacagatcagagatcaagcaaatcgtgcggattccagaaaaaaaggcagacttttccgttcgaaaactatataatgaatatcacataaataggcgtcacttcagaaccaaatacgtggtggaaagcagaaaatgaggtttggcggcactgaacgaaaaagtctaccttttccgttatgtacctatttttctcgtgtccagcggaggaaagtgtcttgtgcgattcccagttgccttgccgcttcccgtgaagagatctctttattctcccattcccttttcagtctgcgaaactccggagggatctcttttctgggccggccgaatcgcacacctctcaattttgctgctgcgatcccctcccgctgccgctgccgtgtattttccctctccgtttgcgccacataggaaaggatctgcagcaccagatccgccacaaatatgccggtcagatctttccttgtttgccgggtatccagaagcggcatatccagcaccacgatatctacccgtttttctttggtgataaaccgccactgatccaatatttcctcatagtttcgccccagccggtcgatggatttgactaccagaatatcccccggcttgatttttctgacaaggctccggtacttgggccggttgaaatcctttccgctgagtttgtccataaaaatattgctttccggaaccggaaatgcttttaacgccagaagctgccgatcttcattctgttccttggtcgatacacgaacgtaaccataaacttttgattccataagccttcctcccgatattcagtttcatcgattcaaccctttattttaatcgtaagaagttaaataagaatctgtaaaacaaaaagcgccagaccccttgtgtgaaaacacttccacagcagcgattccgtcgctttttgccatttgttcctggttgcttttttgcactgattcacgggtccgatcttccgtaattgcaatgcacaagaaaaccgccttgcttttcagcaaggcggttttcggtgcacatggagcccttcctcacactctcgaaggtatcagacttctttgtctgcgcacttaaccgatatactcccgaccggcagcgctcattacggcctcaaagccgctcgtcgcgcacctcagttcagcaagcgataatctacagcttaataatgctaaaaaagcccggaaatacgccattttccgggctttttctatgcctgaaatcacctgattccgatggtgaaatttgaggaaatttgacttcaaattagtccattttgatgggtttaccatgggtttacggcctatttttgagcctaatgggtgggaaaatgggtttacagaaggccattttggaggggaaattagccccatatccttgacagattttcggcaaaaatccggctgaaacggaatgaaaaacagtgtcaggttcgtttggcgagttctgacgaattctgcaaaaatttaatatcaggtatcctgttacatagagccttggctcattctttgaaaacgagaatgggtcgaggctctatttttttcgcccgaaatccggcgagacaaatttgagcaggaggtaacaggtatgacggatttcaatcagaagacccatgacaccgatgtgggcagtcatggcggacagtcaaggcagatgatggaggtgtttgagaaccaggagtttggttcgatccgcgtgttgcaagaggcgggcaagaccttcttctgtgcaagcgatgtggcgaaagcgttggggtatgtgaatccctacgccgcagtgaaacgccattgcagaggccccctaacgaaacgcgagggggtcgttcagaaggtgaatcagtatggagatgccggagagcaggtcgttgaaatctcctttatcacagaaggcgatgtttaccggctgatcgttcacagcaagctgccatcggcagaacgatttgaacactgggtgtttgatgaagttcttccttccattcgcaagcatggtgtgtatatgagcgattccattttggatcaggtgattcagcatccggaggtcatctacacactggcacaggagcttgtagccgagagagagcagcttgagggtatccgcaaacagctggatgcggcacagcccaaggtagactacttcgacacctttgtaaattcggaagattgcacctgcatccggaatttctgtaaggaaatcggaatcccagagaagacggcagtagctctcttactggatcaccgctatctgtaccgcagtccaagcggctggctgatgccttttgcagacaaatctgcaaggggctattttattgtccgggattgctacggcagaagcggaaaactggtgcagcagacgagagtgacctgcaagggaaagaatcatctcttcaagttgtttaagaaatggggtgtgatcgaatgacgctttttacagagggacgccttcaggcgtttgaacgcatgatgcaggataccggcaaataccatcgacgggaggacagcgaagatcgtccgcgcaaatgtccgaagaaaaaaacggagcctgcgaaaaaggatggtgagcaccatgccggtattcagagttgagaaaaacagcaattacacaacgatgtgcaattaccacctgcgggatcaggggctcagcctgaaaggaaaaggacttctctctatgctgcttagtttaccggacacatggaactattcggtacggggattatcttcgattacaccggatggcgtagatggggtgcttacaactctgaaagaactggaacgtcttggatatctggaaaggaaccagcagcgtgagagtaacggtcggatgggcagagcggagtatgtgatctatgagatgccaaggaaaaagccgtgttcggaatcaccgtgtacggaaaagccgtatacggtaaatccggatacggacacaccggttacggaaaatcccgcgcaattaagtactaatagaacaagtactgaaacaatcaataaaagagagaagaaggaaatccagcaccggtatggctcatacgaaaatgtccttctctctgacacggaatacggcaagctccggcaggagttcccaggagattatcagatgcgggtggaacggctctctgagtatatggcttccaccggcaggagctacaaaaatcaccttgccacaatccggagctgggcaaagagagaaaagccgaagtataacccggcagactacacatttgaggaaggagacagcctatgagcgacatggtgcctgaagtattgaatgcggcgttggattcgctctttacgccgaaagaacccggagagcaggaataccagggcgtggacggactgctgtattgccggaactgtcatactccggtgcagtgcagggtaaagctctggggcagagacaagattgttccctgcctttgcagatgccagcaggaagcaatggcggaaaagaaacgccaggatgaactggtggagcggcagcgtaaaatcaggcagctgaaagcaactgggattcaggaaaagcatcttctggaatggaattttggcgttgcagaagacaacaaggacatccagatggcaaaacgttatgtggagcagtggaaaaaggtcaaggctgaaaaccttggccttttgttatggggagatgtcggaaccggaaagtcctttgtggcggcatgtatagcaaatgcgctgctggatcagggcattccggttttgatgacgaacttctccaaaatcctgaaccagatgggtgccatgtattcggaagaacgataccggtatatcgcttcgttttccaactattctttgctgattctggatgatctgggaattgagcgcagcaccgaatatgcgctggagcaggtctacgctgtcattgatgagcggtataagtccgggcttccggtcattatcacaaccaatctgaaaattgcagaaatccgcaatccgcaggatgtggcatacgcccggatttacagcaggattctggaaatgtgtacgccggtgcgaatcagcggagaggaccgcagaaagagcattggaaaagaaaaacagcaggtcgttaaggaggtacttgatctatgaagtgcaaggcaaaaaaggcgtttttcgcaggtaagaatgacatctatcaccgctggaaggaggttaagaatctgaatggcaaaagcaaaaaccagtattacaacagaaaaccgcagtggctcagctgccgacgctgcggctaaggagcagcggacggagatgccgctttctgacctgcatccctttgaaggacatccctttaaggtgctggacgatgagctgatggaacagactgtggagagcatcaagcagatcggtgtggtatcaccactgattgtccgacctgacccggaaggcggatttgaaattctttcaggacaccgcagacttcatgcggcgcagctggcaggtttggagactgtgccggtcatcgtcaaggaaatggacgatgatgcagcaatcatctttatggtggacagcaacttgcagcgggagaatattcttcccagcgagagagcgttttcctacaagatgaagttggaggcgatgaaacatcagggtcagagaaaagatttgacttcggagcaatttgcaccgaagttgtctacggagattattggtgaagctgttggaatgagtaaggatacggttaaacgctatatccgccttaccaacctgattcctgaaattttggatatggtggatgagaagaaaatcgcctttaatccggcggtggagttgtcttacctgaaaccgtctgaacagaaggaatttctggaggcaatggactatgcacaggcatctccatccctgtcgcaggcacagcggctgaagaagttctcacaggagggcggctgcacgttggatgccatgtgtgaagtgatgaatgaaatcaaaaaggatgagcttgaccatgtgacgattaaaaacgaggttcttcggaagtattttccgaaatcatatacgccgaagcagatgcaggacacgattatccggctgctggaaaaatggcagcgaagtaaacaacgagatatggaacgatgagaaggagatttttatgatgatgaactttaagaagaatcagaacaacgcagtgtgcagcatggattgcaagaactgcccgcacggtgcatcgcagcccaatccgatgaatgatcccatgtttgagaagtccattgcgatgcttcataactggctgatgctggaggcaatccgtgaagatcacccgaaggagcgcattgtgatggtgatcctgccgggggctggcggcgaactcctgaccgaggatggcagtcgagacatctttgaggatgtttacgatgagatggaggctgatctggtggcagatggggaactgcttctccattatgataagagcgatgtgatcgagactgacagaacccgctatctgttgggagctgcggaggtttcggaaatcgaccagaacggcaacgaatgcagcatcaatctgtttacgctggaacgcaccatcgactatgtgaacgagaacctgacggtggtttccattggcggcgagttggttccagcactgcgcctgatctaaggaggtgcctatgaagaaatttgatgtggagattacagagactctccagagaaaggtttccgtggaagctgcctcacaggaagatgcggaacgcatggtgacgcaggcgtggaacaatcaggactatgttctggattccggcgatttcactggtgtggatttcaagaccgttggagaacatgaattggcagagaccaggacaatggatgtgctgctggtacagcccaatgcctatccgaagaaaatcagtgttggcacggagctggaagatttgcaggccatggtcggcggcgatattgaagtcacctatccatttgaggatgaagtggccattattctgaatgaatccggcaaaatcaatggtctgccgctgaaccgtgcgatttacaccgaagacggggatatgcaggacatttatgccggtgattttctggtggtagggctgacagaggatgactttggttctctgacttcggagcagatgcagaaatttgaggagcagttccatcagccccagatgttcgttcgtatggggcgcagcatcatggcgattccggttccggatgacatggtgaagaagatagaggaaaaggctgcaaagccccaggaaaagagcaaaccggcaccggaccgggatagtttgtaaggaaggaggcgaatattcatgcaggaagaagttgaaaatcgtaccgtcaatctggcaatcagcaccacgaaactgacctttcgcaccatcgtgaatggctataatgcctggaaacggcaccatcaggcgaaggtggctcagaaaacgtcgcagttgccggttggaaagcagagcatcaaagaactgatcggtcagaatcagggagtcagcagtatccccattgagaaaacggatttgaaaggctttgaacaggtggcacggaaatatggtgtggattatgccattacgaaagaccaaaatgtaatgccacccaagtacacggtgttctttaaggcgaaggatgcggatgcactgacttccgcttttgaggaattcaccaaccgaaagctgaaaacaaaggaaaaaccgagtgttctggagcagcttaacaagctcaaagagctggttgctacaattctgccggataaggttcgccacaaaagtcaggagcatgatctatgagtaataagaccaaaaagctgctgatcctgaacctgccgtacttcattgccggtcttatatgtacaaatctgggagaagcgtggagaattgccgagggcgcagacatgtctgaaaagctcctcggctttctttctgccctgggtgcagcattttctaacccgatgccaagtctgcatccgatggatttgctgattggtgtgtgctgcggagcgggtttgcggcttgctgtgtacctgaaaggcaaaaatgctaagaaatatcggcatggcatggagtatggctctgctcgttggggtacgcagaaagacatcgaaccgtttgaagatccagtgtttacaaacaatgtgattctgacccggacggagcggctgatgatgggcaaccgcccgaagaatccggcaaatgccagaaacaaaaacgtgctggtggtgggcggctccggcagcggcaagacccggttttggctcaaacccaatcttttacaatgccacagttcctatgtggtcactgacccgaaaggcgatatcgtaatcgactgcggccaagcccttttgaagaacggatacagtatccggattttcaatactatcaatttcagaaagtcgatgcattataatcccttcgcgtatattcacagcgaaaaggatattttgaagctgaccacaaccctcattgccaacaccaaaggggacggcaaggccggtgacgaattctggacgaaggcagagaccttgctgtattgtgctttgattggttatatccactatgaggcaccgctggaagagcagaactttgcaacgctgattgaattcctgaatgcgatggaagtacgcgaggatgatgaaacctttcagaatccagtggatcagatgtttgaagctctgaaaaagaaaaaaccgaaccactttgctgtccgccaatatgccaagttcaagctggcggcgggcaagaccttaaagtcgattctggtgagctgcggcgcacgtcttgctcccttcgatattgaggaagtccgtgatatcactatgtacgatgagctgtcgctggatacggtgggagataagaaaacggctctgttcctcattatgagcgatacagacccgacttttaatttcctgatttccatgatttacacacagctgtttaacctgctgtgcgaaaaagcggatgatgtttacggcggcagactgccggtgcatgtgcgctgcctgattgatgagtgtgcgaacattggtcagattccgaatctggaaaagctagtagccaccatccgatcaagagaaatctcggcgtgtctggtgcttcaggcacagagccagttgaaggcaatctacaaggacaatgccgataccatcatcggcaatatggattcccgtatttttcttggcggttcggagccgactacgctaaaagaattgaatcaggcactggggaaagaaacgattgatctgtacaacacttccgataccagaggtaatagcccatcctacggcaccaattaccaaaaagtcgggcatgacctggcctcggtggatgaactgtctgtgttggatggcggtaagtgcattttgcagctgcgcggtgtgagaccgttcaagtcagataaatatgatctgacccagcatccgaactacaagctcactgccggtgctgataagaaaaacacgttcagcatcgaggcgtttcttgaccatcggctgaaactaaagcccggtgataagttcgaagtggttgatgcagatcatgccaagtaagttcgttccggtgacgaagatgtcataggtgtgctgttgacaacagaataagaaggggcggcgagctgccgcctctttacatagccaggtttctgattgggattggaaatctggctatatgtttgcccatttgcaggtgcacatgcagatggaaaatcactattcatcaacccataagggcgcaacgtacaaggaggtacacatttatggcatttttcaacagcgcagtaaccgttcttcagaccctcgttatcgcactgggtgccggcctcggcatctggggagcgatcaacctgctggaaggctacggcaacgacaaccctggtgccaagtctcagggcatgaagcagctgatggccggtggcggtgtagcactgatcggcacgactctggtgccgctgctttccggtctgttcggttaagcaaaggctgtcggagcgaagattccgaccgggcggcgaaagctgcctgttacatagtcaggtgcaggcaatctccgcagctggctattttctgcgctctctggcaggtgcacatgttggaagtatggcgcagaatcgcagtttagaatcgcaccggctgataggccggacaagttacaggaggacaaatctatggcgtttcttactacaactgcatcggcactgtctcttttctcacagctgtttatgcttctgtcccggatggcgaagctgttcggcgtgttcgcgtaaggaaggaggcggctcatgcagagtatccttgaacagatcacagattggctcaagagcatgatcatcagcggtatcatgggaaatctttcagggatgtttgattcggtcaaccagcaggttggacagatcgcaggagatgtgggaaccacaccggcaaacttttcacctgcggttttttctatgatccgcaacatctcggaatccgtgatcctgcccattgccggaatggtgctgacattcatcgcttgttatgagctgatccagatgctcatcgagcataacaatctggcaaatttcgagacctggacatttttcaaatgggtctttaagacctttctggcagtgaccctgatctcgaacacattcaatatcacgatggctgtctttgatgtggcgcagcaagtgatctcccgaagcggcggtctgatttctggcagtacgtccgtcagcgatgcgaccctgacagcgatgcaggccacactggaaggcatggacttgggaccgctgctgggactgtatttgcagacctttgtggttcaggtcacgatgctggcattgtcggctattatctttgttatcgtgtatggccgaatggtggaaatatatctcatggtaagccttgcgccgattccgttcgcaacctttggaaaccatgagcagagccacaccggtcaaaactatctacgctccctgtttgcactgggattccagggctttcttatcatgatctgtgtaggcatctatgcagttctgattcagaacctgtccttttcggataacattatcagcagcatttggggcgttatgggctatacggttttgctggcatttacgctgtttaagacgggaagcctcgcgaaatccgtatttgcagcgcactaagagaggaggaatgagtcatggcatcttatatttctgtgccgcgagacctttcaaaggtcaagaccaaggtctttatgaacctgaccaaacggcagattctctgcttcggagccggtgcgctgattggtgttccggttttctttttactcaaatccagcgggaatctgagccttgccgcacttggcatgatggcggtgatgctgccgcttttctttcttgccatgtatgagaaagacggtcagccgctggaagtggtggcaaagcacttctatgaggtaaagttcaagaggccgaaaacgcggccttacaaaacaaaaaattactatgcactgctggttcagcaggcagacgtggaaatggaggtaaatcgcattgttcaaaattctcgaaaagctgacagcgaagaataaaaagcaggatgacatccgaatgccgtcccatctgtcagccgcagagcaaaaacaggtgcagacggtgattgaccgtgcaaggggtgacagcacggttccgcactcagctcaggatagcattccctttcagcggatgttcccggatggtatctgccgtgtgacggacaactactacaccaaaaccattcagtttcaggacatcaattaccagctggcacagcaggaggatcagacggctatctttgaggaatggtgcagcttcctgaacttctttgattccagcatccgctttgagctttcttttatgaatatggctacggatgcctcgaattttgagaagatggtgcgtatcccgtaccagaaggatcatttcaatccggtgcgcacggagtacagcaccatgctgcgccgccagcttgcccagggcaacaacggcctgaccaagacgaagtacctgacgtttggcattgaggcggaatccatgaaacaggcaaagccgaggctcattcacatcgagatcgacctgatgaacaacttcaaacgcttgggtgtccgggcaaaattgctgaacggcaaggaacggcttcatctgatgcacgatatgttccacatgggtgaccatgaccgattcaatttcgattggaagtggttgccggagagcgggctgtcggtaaaggactttattgcaccgaccggttttgcctttccgaagaaccgtatttttcagatgggcgggatgtatggctccatgtcctatctccagatcacggcttccgacctgtcggatcagctgctgaaggattttctggatatggaatccagccagatcgtgactatgcacattcagtcggtagaccagaataaagcaatcaaatccatcaagcacaccattacggagctggatcgttccaagattgaggaacagaagaaagctgtccgttccggatacgatatggacatcattccgtcagatttggcaacttacggcaaggacgcaaaggcactgctgaaggaattgcagagccagaatgagcgtatgttcctgctgacctttctggtgatgaacaccggcgagacggagcaggagctggaaaccaatgtgtttcaagcttccagtatcgcgcagaagtacaactgcaacctgcgccgtctggactttcagcaggagcaggggctgatgagctgtctgccgctggcacagaacctgattgagattcagcgcagcatgactaccagcagcacggcaattttcgttccgtttaccacccaggaactgtttcagaccgggaaagaggctctgtactatgggctgaatgctctgtccaacaacctgattatggttgaccggaaaaagctcaaaaaccccaacgggctgattctgggtactcccggttccggtaaatccttctctgccaagagagaaatcgccaatgcgttcctggtgacggatgacgatgtaattgtgtgcgatcctgaagccgagtacacggcactggtgaagaaatttgaggggcaggtcattaaaatcagcccttccagcacgcagtatatcaacccgatggacatcaatgcgaactattcggaagaggataatccgattgccttgaaagcagatttcatcctgtccctgtgtgagctgatcgtgggcggaaaagaaggcttgcagccggtagaaaagacggtcatcgaccgatgtgttcatcagatttaccagacctattttgagaatccggtgccggagaacatgccggtgttgcaggacttgtacgaggcactgctccggcaggatgaaaaggaagcacaccatgtggcaacggcactggaaatctatgtgaccggttcgctgaacctgtttaaccaccgcaccaacgtagatatcaataaccggctggtctgctatgacatcaaggagctgggcaagcagctgaaaaagatcggtatgctggtggtgcaggatcaggtctgggggcgtgtaaccgccaaccgcaatgccggtaaagccacccgctactatatggacgagttccatctgcttttgaaagaagagcagacagcggcttacagcgtggaaatctggaagcgattccgtaaatggggtggtattcccaccggcatcacccagaacgtaaaagatctgctttcttcccgcgaagtgacgaacatttttgagaacagcgacttcatttatatgctgaatcaggcagccggtgaccgtcagattctggcggatcagctgaatatcagcccgcaccagctgtcctatgtgactcactccggcgaaggcgaaggattgctgttctacggaaatgtgattttgccgttcgttgatcgtttcccgaccgatctggaactgtaccggattatgacgacaaaattaaccgaagttcaggaagcaaaggaggcgtaagcaatggctggcaagaaaaatccgaatctcggagacaagctgcggcaggagcgcgagcgtgcggggaacacccttcgcgattccagaagcaaaaccgcagatagcagtacgggagacggcggcaagaaaaaagcggaacaccgaaggcagattcgtcacgaggccgatcttgctaagatgcgcagtaagaagctgaaatcagagcaggaagtaaaagcgaaaaagaatgcagcagcttccggggaaaaaagcggaaagcaaaagaagccgggaaatcttgcggcagatgcactttcagccaaggcacatcagagtgtgcgcaatgccgaccaggataataattctggtgtggaggcagcgcattttaccgaaggctcagcggaaggcgcagcccgtgctggttcccggttccaatatggtcgaaagctgcggcagtacaaaaagctggagcggttggagaaaaaggcaaataaagatgccgtagattccatctttgcggaacgcatgaagtctgatccgcaggctggttccaatctcttttcccgatggcggcagaagcaggccatcaaaaaagagtatgccgctgcgaaggcaggtgcggccgctgcggagaacacagcatctggcacagccaaagctgcgcagggtactgtcagtataacggaaaaggcatttcagtttgtgcagagccactcgcatatcatcatcggtatcgcagccgtgggactgcttgttttggtgattgccgggtcggtttcgtcatgctccgtcttgatcaatggcggcggcaatgtggtgctggggacttcctacacggcagaagatgaagatttgaaaggcgtggagacggattataccaagctggaagataaacttcgcaaacaaatcgaccgcattgaaaccgaccatccgggctatgacgagtatcgctacaatctggcagagattggtcacaatccctatgagcttgcatctctgctgaccgtagaatttgaaaactatacgagaagccaggtgcaggcgcggctccagagtatttttgaagcgcagtatgagctgaagttggaggaaaaggtggaaatccggacaaggaaagaaacccgtgtgggctatcgctacaatccaatcaccggaaccgggcacacctacacctatcaggtgacggtacagtatgagtataaaatcctcaatgtaacactgctcaatcggggcgttgactatgttgcaagaaattccggccttacagatgaccagctgcaacgatacgaagtcacactggagtgccggggcaatcgggatgacctgtttgcaggcatagcctttgcaacgccggatggcgcgggttccagcggagaataccaggattacgacattccgggcgaagctctgacggatgaaaaattccggaagatgattaccgaagcagagaaatatctcggttatccctatgtttggggcggcagctcgccgagtaccagttttgactgctccggttttgtaagctgggtcatcaaccactgcggcaatggctggaatgtaggcaggcagacggccaacggtctgatgggaaaatgcgacattatcccgaagggtgaggcaaagcccggagacctgatcttcttccagaaaacctacaacaccagtggcgcatcccatgtgggcatttatgtcggcaacgggatgatgattcactgcggcaacccaatttcctatgcttccattgagacgaactactggcggcagcattactactgtatgggaagaattcgataaaaacagggcgtttattcgtccggaaaggaaacgatatgagcttgaaactggaaaagattgctgcggagcgggagaaagcccgcagaaaacgcgatgagtgggaggagcgcagaaaggaatgggacagaaagtaccacgaacaggaaaacagcgaaatctgtgaaatggtacatgcccagagcctgaccccggaacagctggcagtcatcattcagatggcgcaggctgcggttccaaacccggaaaacatgaaactggacgagaaagaaacggaggatgtggaatgaaaaagatgatggcaatgctgcttgccagcgtgatggtggcaggaacctttgcgactactgcgtttgcctatacgggcgatgatgtgcagaagaacacatctgtcagtaccgctgcgcaggaagcggatgcagcaggaagcgcaaatgcagggaaaacggacaataccgacagcatcgaaatcgacccggatatgcaggtgctgccggatggctatgaggtttctacggatgcggatgggaacctgatcgttacggtgggcggcaaggaatacaacatcggcagcgaaaagtctcgaaagcagatgggtacagtggtgccgggtatcaccagcctgcattttcgttccggtcccggcatggatcaggagattatcggatatctgcattcaggcgatacggtggagattgtcgaaaaatgcggtgactggtataaggtgaacttcaacggcaaaaccgggtatgcacatggaaagtacctgaatgtcacggattccacaaaagacagcagcatgttcagtgaagatgcgctgaagctgtttctggatctgatgcagagcggaatgtcatccgaggatgagacagaatccagtacagctttgactccggaaggaaatatgacgctggtggacgatatcggtgaggaagaagataaatccagccagcagttcatcacactggtgacaaaggcgggcaacaccttctacctgatcatcgaccgcgataaagacggcaaccagaatgtgcattttctgaatatggtggatgaggccgatctgcttgcgctgatggatgaagaggaagccgccaagtatcaggagaagaaaccggaagtcacggaacctgctgaaaccgaaaagccgaaggagacggaacctgcaccggaagagcaaaaaacagagagcgagcagaagaaagcttccccgctcccgatgattatgctgcttctgtttgtgatcggtgcagccggtgtcggcggttatctttatgttaagatgaagggcgtaaagcctgcgtccaagaaaaatcagccggaccctgatgcggattatcacgatgaggatgaagacgcgctccagctgccggaggatgacggtgacgaggacgaagaagtggatgtcaacgaggattacgaagcagaatcggacgatgaacctgtctgattaacgcagcgttgacctgtggggcggctgagaagccgtcccttttacatagcagtcatgcgcttcggtgcctggctgctaattttttgcgaaaggagcagtatcgaatgaagcttgtattagcggaaaagccctcggttgccatgagtctctcgaaggtgatcggggcaaatcagcgcggagacggttatatggagggcaatggctaccttgtcagctggtgtgtggggcatctggtggaactttcccagccggaagcctatgatgaaaagtatgccaagtggaggtatgatgatcttccgattttgccggatcattggcggtatcaggtatctgccagcacgaaaaagcagttcggaatcctgaaaaagctcatgcagcggaaagatgtggatagtctgatctgtgcaaccgatgcagggcgtgagggagaactgattttccgactggtttaccatcagtgcggctgcaaaaagccggtggaacgactttggatttcctcgatggaggacagtgcgatccgggaaggctttcagaagctccgaccgggaacagaatatgatgccttatatgaggcggctttatgccgggagcgtgccgactggattgtcggaatcaacgccacccggcttttttcatgtctgtatgggcagaccctgaatgtggggcgcgtgatgacaccaacgcttgcgatggtggtcatgcgggatgcagcaatccgggctttcaagccagagctgttctactcggcagaattgaaatttcgggattttcaagcaggtggtgagcggatgaaagaaaaatcagaagcagaaaaactggtggcagagtgctgtcaggcaggtagtgccatcattactaaggtggagcagaaagaaaaatcagagaagcccccggcattgtttgatctgacctcgcttcagagagaagcaaaccggcagttgggattcactgcccagcagaccttggattacacgcaggctctgtacgagaagaaactcgtgacctatccccgtaccgacagccggtatctgatggatgatatggcaccgctggtgccggaacttgtttctgtgatccagcagagctttcagattcaaccggatgagccagcaccggtgaatgcagcgcaggtcatcaattccaagaaagtgaccgatcaccatgccataatccccacaaaaacagcggcgggttatgacatttcctctcttcccagtggagaacaggcgattcttaccatgttggcggtgcgtctgatttgtgcggtaggaactccttgccgctatgcagaaaccatagtggaagcggagtgcgccggtcagaagttccgcacgaaaggcaaaacagtcacggatatgggctggaggcaatatgcaggaaagccggttgaagatgctgagaagaatgcggaggcaggtgatcttccggagctttcggaaggcatgacattggaacttgccggtgtcgatctgaaagaaggcaagaccagcccacccaagaggtttaccgaagctatatgctgtgaaagggggataagaaatcgcccatagaaaggagagtttttcaatgaaagcaaagaaaacggacaacggcaagataaccgcactatacgagcgtctttcccgcgacgacgacctcacaggcgacagtaacagtataatcaatcaaaagaagctgcttgaagattatgcaaaggagcatggatttacgaattgtgtccactttactgatgacggctggtctggcgcaaactttgaccgccctaattggaaacgcatgattgcagccatagaagccggagaggtttcccatgtgctggtaaaggatttgagccgcgttggtagagattatctgcaagtgggtttttataccgaagttatgtttagagagcatggcgttcgcttcgttgccattgcaaacggcgttgacagcgacaagcgcgaaagcagcgagtttgcaccctttttgaacattatgaatgagtggtatgttcgggactcaagccgcaaaatcaaaagcgttctccgggcaaagggaatgtctggcatacacactaattccattggtatttatgggtacaagaaagaccctaacgacaaaaaccattggattgttgatgatgaagccgccgaggttgttcgccggatttaccgcatggcgatagagggaaaaggcccgtatgaaatcgctcgtattcttgcttcggaaaaagttgaaagaccgtcctactaccttgcacagcgcggtttaggcaaacataaaaccagttacaaccccgacgagccatacacatggcgcggcggcacagttgcagatattctatccaagccggaatatatcgggcatacggtaaactttcggacttataaggagagctacaaggacaaacactccaaaatgacaccaaaagaggatttagtcatttttgagaatacgcaggaagcaattattgacaaggaaacatgggagcgcgttcagaccttgcgaaagacaatccgtaggacagataccataggcacagcaaatcccttaacaggcttgatgttctgtgctgattgcggggcgaagatgtataaccacaggggcaaggctggcaatgcgcgggattgggcagggcgaccaactggaaagaaacgtccagaccgcgacgaatacaactgttcccgttatgatttaggcaatcaacactttgatgattattgcaccacacaccttatccgtactgccgttgttaatgaattactgcttgaagcgataaagaaagtttgcgactatgcacagaacaacgaagccgagtttatggcgcaagtctgttcctcttccgaggacagacaggcaaaagcggctaaagctatccgacagaggaaacagcgcagcgaaaagcgcaccgacgaattgagccgcttaattcgcaagctctatgaggacaatgtaaatgggcggctttcagacaagctctttgaacaaatgttgcatgattttgaagccgagttagagggcttgaccgatagtatcacacaagaccagcaggagcttgaccgcataagcagggaaaccgtcaatgccgagaagtttcttgcccttgtcaaaaaatatacggatttttcagaactcacccccgcaatgataaatgagtttgttgaaaaaatccttgttcatcaagccgagggcaaaggcgcaagccgtacacaggaagtcgagattttctttaactttatcggcaaggtagaaatcccgcgcaaagaaattgaactaacagaggaagaaaaggcagcattagcggaacaggaacgacgcagggcgaagaaagccgagtataaccgccgctatatggagaagaagcgcagacaatggaaagagcaacaggaacgggagaaagaacagcaggaagctcttgaattacccgctgcttccaccgagaaaggagaacgcatagcatgagaatactcattgacaatggcaacacccccgccgccccgcgcccgtatatcgggcattacgggcggttgcggaaagcctaccttgaacagtaccgccccgacctctacaccgcccttgtcgcaaatgagaagctgcatgagcattgcgccgagattgacgaagccgcccggagccggattgaccttatcatgccgcagcttgcaaggagcgcgggagctaccgaagcactcaaagctaccgaccccatgaaatgggtgggactgatgaacgcttgcagggcgcaagcggaggaaatcgccaagtttgagctaatctatgtctgacggtcaagagccggaaaaaacagaaatcttgcgataacagccgccctgacgaaccattccctgtccgggcggtttctatttgaaaatcctcattttccccaagtcaagagccgggaaaaacacccgaaaaatgcccctattgcgtaacaggggcgcagaaaggagagtttatgagaacagggcttacgaagcaggaaaagaccaccgatatttggtttgacgagaaagacccccttatccatatccgcacccacaacaccgacttaaagaagcggcttgccgcctacgccggacagcaccccgaccagtgccgccagaccgacgcagaccccgaaacgggctgcatggagtttgatattgcaaaggggcgtttctctttccgtctgaccgccccatacagtgaggaacggaggaacgccgccagcaaagcggcaaagaaacattccggcaacttgacacaccctattcaaaaagatgtgctataatttttttgaaaaagtttcggattagatgtagtattcgccgctgaaaccgtagtatataggtgaagccggaaaggaggcggtgtgatgatagaagatgagaaaatcattgaaatgttttttgagcgttcagagcaaggcatacgggagctggatataaaatacggtaaagtctgccacaagttatcgtataacattgttaacagcaggcaggacgcggaggaatgtgtcaacgacgcttacttaggagcatggaacgcaatccccccggcgaacccccacccgcttctgacctatatctgtaaaatcgttcggaacatttcactgaaaatctattacagaaaggaagcagccaagcgaaacagcacttacacgattgctatggaggaaatcgaagcctgtatagcagacccgaacacagtggaagccgagattgaagccagagagttagcccgtatcattgaaagttttctggacacgctgaccgtcgagaaccgcgttatcttcatgcgccgctattggttttccgatagctgtaaagacatagccgagtttgtagggctttcggagaaaaatatctccgtccggctgacccgtatccgacaaaaaatgaaaagctatttagcagaaagagaggtattcgtatgaactcaaagaagttttccgaagccatgagcgagcttgacagcaagtatgttgatgaagctatcagctacaagaagaaagcaaaaaagccagtttgggctaaatggggagctattgcagcctgttttgtagctgtaaccgtcttaggtgtgggattgtttcaaagtggattatttggcagtcataccgatatagccacattgaataacggggaaaaaattgtttttgtgaagtctgataatgttggcggttctttggctttagatgtagatgtaactacaaagccacttacagaagatgaaaccttagctttattttcggatttacctgttacagccaatgcaatttttctaaatagcgatatagacgcaggcggttcacaagaactgattggatttgagggacaagtcggaaatgtgaaagtaatcatttcaacatcagatgtgcagttgcttgatactgtaattgttggaacggagaaagtctctgaaatcaacggtataaccatagtcgcaggatattttgtaacagacccgaacagccgaggcgagcaaaatgctatttactatgcgacctttgagattggcgattgcaaggtatatctggaaaatggcggcatgaaagatgatagcgaaacaataaaaaatcagttggcagaagttatccagaagctgacagaaaacgggaatttggacttaacttcttttagtgacgaaacaggtatgaagcttgacggaaacccagacggatatgacccgcttcctgacagccagacttctgatgaagaagtatcagaacaagaccccgccgcaaactgaataatctatctcatatcgaaagggcagccgagaaaagcgactgtcctttttctatgccgacaggcagaaaggagcggccagctatgacgaaaccgagagagaaaacccgcgaggaattgactgccgagattgaggacggaaagaagaaaatccggcagtttgagaaccgggaaaagatgttgcgtcagaagttatccaaagaggaacgccggacacgcagccaccgccttatcgtccggggcgcggtctttgaaagcattgtgccggaagcaaagaacatgaccgacgaggaagccgcagcacttctccggcttgcattgacgagtgaaccagcgcgggaatatctgaaaaaacgagccgaaagcgggaacgccgaataaatccctttggaacaaagggcgccgaataaatccctttggaacaaagggcgcacttatacacccttgcgggcgtgtgcgctctgccgagggcttatctccgcacagggagatttccccgcgctccgattggcggctttgccgcaacaaggggctgcaccccttgcgccgcttcgcggctatccctgcacacccacaaaaacagtacacccgccgttggcgtctgtaccatttttgcaggttttattatcctatccgggaggtgatacccatagccatttaccattggaacatcggcattgtgagccgaggaaaaggcaaatcagccgttgccgcagccgcctaccgaagcggcgaaaagctgacaaacgaatgggacggaatgacccatgactacactcgcaaaggcggcgttgtccatacggaaatcatgctgccgccccacgcgccaccctcattttctgaccgttcaaccttgtggaacagcgtggagctttacgagaaagccgggaacgcccagcttgccagagagattgacgcggcactccccatagaattatccagagaggaacagatccggcttgtccgggaatactgttcctctcaatttgtttccagaggaatgtgtgtggattttgctatccatgacaccgacagcggcaacccccattgtcatatcatgctgaccatgcgcccccttgacgagcgcggcgcatgggcggcgaagtccaaaaaggaatatgaccttgacgagaacggcgagcgtatccgcttgccaagcggcagatacaagacgcacaaaattgaccttacaggctggaacgacaaggacaacaccctcttgtggcgcagggcatgggctgactataccaacgactttttggagaggaacggaagcccggagcgtatcgaccaccgcagcaacgccgagagaggaattgacgagatacccaccgtccacatgggcgtggcggcttgccagatggagaagaaaggtatcgccaccgagaaaggcgaactgaaccgcagtattcaaaagacaaaccgccttatccgggaaatccgggagcagattaggaagctcaaggaatggattgccgacctgttcaaagcgcgggaaaccgccccggaacagccgccgcaatctcccaaccttgcaaatctgttgatgaagtatttgagcgttcagagagaaaagagccggaagtattcgcagcgttggcaacaacagcacacagccgatgaactgaaaaccatagcggcggcggtcaactatctttccgagcatggtatctctaatcttgacgagctggacgcttccctttcctctgtcagcgataaagcctattcaatccgggagggaatgaaaaccgccgaggaacgcatgaagaagctgcaaaaactcatggagcacggcagaaattatcagacctacaagcccatacaggacgagtaccggcaaatccgctggaaaggaaaacaggagaagtttgcagaagcccgccgcgccgagctgaccctatgggacgcggcaaaccgctatctgcgggcaaatctgccgaaaggaacaaagaccttgcctattgcggaatgggaacaggaatatgctgacctcaaaacgcagagggacagcgattataccaaactgaaagatacccgcgccgaggttgccgagcttcaaaaaatccgcaaatgcgtggatattgcactccgcgccgaccagccggaacagacgcagagccgcaccaagcggcacgatatagaccgctgaaaggagttgaacttttatgtattacacccaagaacagatagaccgcgccaaccaagccgaccttgtttctttcctgcaatcacagggcgagcagcttacccgcgccgggaatgaataccgctggaagcggcatgacagcctgaccgtccggggaaacaaatggtacaggcacagccagagtaagggcggtgcacccattgattttgtcatggagtttttcggcaagagcttcaccgaagccgttgaactgctgacaggcgaaaaaggagccgccccgccgccggacagaccaagccccgcgcccctatccgacttccgactgccaccccgcagcaccgacaaccgcatagcgaggaactacctcacagcagcccgccgcattgatgaagatgtgacgggctttttcttttccaccggggatatttacgaggaagtcgcccaccataacgccgtattcgtcggcagagatgaaagcggcataccgcgatacgcccatcagcgcggcacagccgggagcttccggcttgatgtgaaaggcagcgacaaagcctttaacttctgctaccggggcgagggcgaaagattgtttgtttttgaagccccgatagacctgttatctttcctctgcctgttcaaaaaggaatggcagaaacaaagctatcttgcactgggcggcgtgggagaaaaagccctgctgcgtttcctctctgaccgtccgaacatcaagaccgtttacctctgccttgacagcgaccaagccggaagcgacgcttgcagccgccttgcggagtttgtgccggagggcttgaccgttcaccgccttgtgccgctttacaaggactggaacgaggtattgcagcaccgggcagaaatcgcggacgggaagtatatccgggaagcgatttacggcttgaaagagccgccgcaggaagaaaccgttgagattatccgcatgagcgaggttgacacacagaccgttgaatggctatgggagccgtatattccctttgggaaagtaaccattgtgcagggcaatcccggcgagggcaagaccacttttgccctacgccttgccgccgcctgcaccgccgggggaacgctgccgggaatgaaatccttgcagccattccaagtgatttaccagaccgccgaggacggtttgggagataccgtcaagccccgcttgatggaagcagaagccgaccttgaccgcgtacttgtgattgatgaagccaagcgggagcttaccctctccgatgaacgcatagaaaaggcaatcacgcagaatggagcgcgtctgattatccttgaccccatacaggcgtatatgggcgacaaagccgacatgaacaaggcaaacgaggtgcgccccatttttcgccgccttgccgaagttgcggagcgtaccgggtgcgccgttatccttatcggacacctgaacaaagccgccggaggacagagcgcataccggggtttaggttctattgacttccgcgccgcagcaaggagcgtcctgctgatcgggcgcgtgaagcgagaaccgaatgtgcgcgttatcgtccatgacaaatcttcccttgcgccggagggcaagcccgttgccttttgccttgacccggaaacgggcttttcgtggataggcgaatacgacatcaccgctgacgagctgctgtccggcgctggcggcaacaccgccaccaagaccgaacaggcggaacggctgatactggatttactggcagacgggaaagagcttgccagcgaggacatagagaaagccgccacagaagcgggcatatccgcccgtaccgtccgggcggcaaagagaaaccttgacgggcgcattacctcaaagcgcattggtgcggcatggtatcacgctcttaaaaagtgaaacggcaaaatccaagtggcaaaacccagataccttgccactttgccacttcgccacttcaacctcaaaaccactgccccatgtatgaccgcatggggcttttctcatggaaaggagagcctatgaacaacgacaccagcaaccgcagcacccccgcaaccgcttcccctctgaccgtaaaggaagccgcgccacctgtaatgataaagaaaatcggaaagaccacctaccgcgtcaaaatccatttcagtgaaacgagcaaagaaaccatgagcgacaaaatcaagcgtctgattttgaatgacagcgaaaaaagttcttaaacacccttgacaaaacgtatcagaagatcttctgctttcagcgatggaaagtgcgagctcggatgaatttccggctggtgtagagcgaaaaggcatcggcacaccagctacacgcgctgccatcatcgaaaaactggtacagaaaggctttatcgagcgcaggggcgataagaaaacgaaatacctttgttctacggacaagggaaatgcgctggtgacggtggtgccggaacagattcagtctccatccatgacggcagactgggaggaaaaactgctgaaaatagaacacggcgagtatgacagcgatgcctttatgggagaaatcagcagcatggtcagcggacttgtaaaaacctacgaggctgtgaaaggtgccaatgtcctgatgcagccggaatgcaaagtcattggttcctgccccgcctgcggcagtgatgtttgtgaaacggcaaatggatggttttgcagggataagagctgtaaatttgcgctctggaaggaaaacaggttctttcagacactgggaaagcagatgacagaggaactggcaaagcaactggtaaatcagggaaaagcacggcttacccactgctattccaagaagtctggacgttactatgacacaaccgttcatgtagagactggcgaggtcggtgcagcagcatttaagctggagtttggaggtaaaaaatgagcatgaaaatgatgaatgcagcttatttggtggataatgctgcgctgctttccttgcaggaaaagcaggacggcgtggaattccattgctttgatatggacagcaaggtgcagaccaccgagggacacattggctgggatgtgttggataaacagccgtcttctacgctggaagaaagcgcaagggtggtagcacttcagaagattccccagcttgacggtcttgccgttgcgccggtagctccggagatgctggagcaggtacgcggcggcagaaaggttctctggcagatgaaaaaggctgatcctgggctggagaatgcaaaaaatatccggtttatcaccagcaactacgaggatcggttcaaaattccggatggcagtgcagtggagatcgagtatccgaaccggaagttctcagctcgctgcgaatatatggacgaatatcatttgcgcctggggtatgatgttttgcacatctgtcagctggcagaaatgctggaacgcggcggtggtacatgccgcccggagccgctgattacggaagaacgcagcgcatgggatttgggaagcaagggctttcttgccattcagacctgtgaggacggttacgactataccttatatcataaggactttacggaaattaacggtggacagatcgacaacccggaaatcagcatgaatgcagccagagaccagattctttcggattatgggttcggtggccgcaccatgacgcggattgactatgatgaactttgtgatcgtgcagaggaagcggaaatcagcagacgggaatctgtgctgggtaaactctcggatttgtcttccagaacggatacgccggtgaaagctgccaaggcgaaggaggcagagcgatgaaatacaagcttacgaaggcagagcaggaaaccgtcatcaattttgataatgaactggataccgccagcatttatacccatgacagccgcctgattaagaagcttcgggaactgcgaaaacagtatccggagcagtttattttggagcaccgggagcatgggtcggtcacttatacgattccgaaacgctgcgtcggtatccgaccgccttatagtgaaaagcggcgggaacagcagcggcaggaagcaaaggaaaacggcctgccgtttatggagaagggagaaatgaacgatggcaagaattgaaaaatgggatgaagtgcatggaacgcaggcaccggacgaaagaatgatggcatttctcgacagtactaccgaccagtatgcgattttgcagcttcgccgcagcgaggatacggtatatgaacgcttttcgtctatgcgcgaactggatcggatggggctggaaccggatattgaccattatgaggtggtttatacggctccgcttcttccctacaaggatcagaatacgatgttggaggaactgtatgcgaaattcaatgtttcccgccctgatgattttactggtcatagtctttctgtgtctgacatcgtggctttacggcagaatggtgttgtaagctgtcactatgtggattccatcggcttccaggaactgcccggatttttgaaactggagaactacctgaaagccgcagaaatggcgatggaggacgattacggcatgattgacggcgtaatcaataacggaaagaaggaagaaccggtggagaaagcatcggttctggaccagctgaaggaaaagcaggaggctgtgccgcctgcgccgcctcgcaggtgctgcgaagaaaaggagttataaatgcgttttacggatgacgaatggatgctcatgatgctttacagccctggcacacggacagggctgatcgaagagcttcaaaagatgcaaaaaagtctgacgggcagagacagaaacctgcgcaggtggacggcctcgctgcttgcaaaactggcagagatgacggatgcagaatatgaggcactggatttgtatccagacgaataaaggagaggaggaaaaagacagatgatgacgaaaacggcttattatatgcagatggcgcaggaagctgcggcacagatcactggtagcaaagagcagtggacagcgtttctgaccacatccgcacggctttataagtatccttttgcggagcagctgatgatctataagcagagaccagaagcgacggcctgtgcagagtacgatctctggaatgatcggatgaaccgctatgtgaagcgtggctccaagggcattgctcttttggacatgcgcggcgagcagccgaaactgcggtatgtatttgatgtggcagataccggagaacggaagaattcccgaccggtacagctctggaaaatgaatgcggagcatgagcagccaatcattcgcgcactggatgcagcatttgatgttcctgccggtgctgggtctctggaaaatcatatcatggaagcggcagaacgccttgcaagggattactgggaggaaaaccgcaggcagatcagtgacatcgttgcagattcctatctggaaggatatgatgaactcaacatcggagcttcctttaagagagctgccgctgtcagcatcgcatattccgtctttacccggacggtgggcaatgcagatgactattttgagcacgaggattttctggacatctttgattttaatacgcaggctgccgccaatgtgcttggaactgcggtcagcgaaatgtccagccagatcttccgggaaattgaacgcacgatccgaacctatgaaagagataagcaggcagaaaggagtcaaaactatgatggagctgaattacacgaagaacggcgattacctgattccggacatccagttgtcggtgcaggaacagaagcccctgggcaagtacgggaggatgcgcagagcatttctgcaggagaacaacacgctgctgtacaatcacctgatcctgaccgagaagctgtacccgcacctgtgggagattcaggagaccgcgaccgcacggatggagcagatgatggcggatcttctgaaagcgaatccggcaccggacaagaaatcgaaccagatggcctgggtgcagcacatgaacatgctgagagcgcaggcagaggaagttattctgacggaacttatcaacagctgagctttatgagtctgtttcagtccgaagcagagcagattcagaaaattgatgcggcggcagaaaatgcagtcatagaagcggagagcgaaaagccctccgcttttgtcatttctgaggatgaaatcgaccggatgctgcggacaggctctaactttgaaggcggaaaaatccgtatttatgcactgtatcagcagcaaggggatgcgaaagaacgagcggcatttctgaaagcggaatatggtctcggtggtcacagctatacctttatggatggcagtcgtggttttgccgattataacgggaaaggcattctgcttcgcaattatggccatgaccgggaagtgcgcctcacgtgggcagcggtggataagcggttagaccggcttgtggaaaatgatcagtacctgaccgcgctggaaatggaagagtatcggaagctggagcaggaatacggcgcgccgcttcctatgccgactgccgcccatgtttttcctccaacaccaccggaacgttacgataccggaaatgaacgtgtggacaatatgctgaatacggctgcggatatctatgcccggagtgaactggcagcaccacagcggtttaccgtgatggaaacagacgatggctatgcggtctgggatgatattcaggatggcattcatgtagagccggatggcgtcagcgaagagtttaccagcgaatgggaggcggagacataccgtcagcagctgattgaaaaagtccaggaacgggaagccaaagactggctctatgttgagcagagtaaacagaatttgcagcaggacattccgttcccggatacggaatccgaagaagcaccggaaccggctcacgcagagacagatcctctggtgctggaaatgcaggaacacgccagagaacttgccagagagtcaggctatgcaccgaatgaacgatttgtggtcacgatgaccggcgagaatttcccggattctaaggatgcgtttgccatctgggattatgttaaagaagagtattacggatattcggacggaaaagtgcagacatttgccgattatgtgagtgcatcagaggcgttgcaggagattcgcggcaggaacatggaggctgaaaaagagcctgcaactgtgcagccagaacccgcagctccggtgcagccggattatcgcgttggcgatacgctgtatctggacggcaaggcatttacgattgaaaaagtcgggcttttcgatgtggaacttcgagacccggattccgtgtatccgatcttccgctcggaaagcaaggaaaatctggcaagaattttggggcatgaggaaaatgttcacctgcacaatctggtggttgatatgaattctggaaaaaaagaagcgttccgggcagggcatgaagcaaaacatgcggagaactaccgcatcaacagctttcacctcggcgaaggcagtcctaagcagaaattccgtgccaacatggatgccatctacacgctgaaagccttagaaaatcagcatagggatgcgacaccggaggaacaggaaacgctggccaattatgtcggctggggtgggctggcagatgcctttgacgcagagaaaactgcctggacaggcgaatataaggagctgaaagcagctcttacggaagaagaatatgccgcagccagggcatcgactctgaatgcgcattacaccagccctaccgtgatccgtgcaatctatgaggcattggacggtatgggatttgagaaaggcaatattctggaaccgtcgatgggtgtcggcaacttcttcggtatgctgccggattccatgctggaaagcagactgtatggtgtggaactggattccatcacagggcgaattgcgcagaagctgtatccgcaggcagaaatcaaggtggcaggttttgaaaccaccgaccgccgcgatttctatgatctggccgtgggcaatgtgccatttggcaactaccgtgtcagcgataagccatatgataaactcggattttctatccacaactatttctttgccaaggcactggatcaggttcggcccggtggtatcgtggcctttgttaccagccgctatacgatggattccaaaaatccggacgcacgaaagtatctggcgcagcgggcagaattgctgggagctatccgacttcccaacaacgcattccgtgccaatgccggtacggatgtggtgtcggatatcattttcctgcaaaagagagaccatcccattgatatcgaaccggattgggtgcatctggggctgacatcggagggtattaccctcaacggctactttgttgaccacccggaaatggtgctgggtgagattacaacggaaagtacccagtacggcaaggaagaatgtacggtcattccgattccaggtgcggatctgggagaccagctgcatgaggcggtgcagcacatcggcggtcactatgaagcacaggagctggcaccggaggaggagttgtccttgcagggcgaaactattccggcagaccccaatgtcaagaacttctcctatgccgtagtggatggggatgtctacttccgtgagaacagcatcatgcggaaggctgacctttctgcgacagccaccggcaggatcaaaggcatggtggagcttcgcaccattgtgcaggaactgatcgactatcagttgaacgattacccggaggaagcgattgcccagaaacagcgggaactgaatgtagcctatgaccgattcgccgatcagtatgggcttatcaattcccgtgcaaatgcacaggctttttcggaagattcgtcttattatctgctctgctctctggaaaatgtggatgaaaacggcaggctggaatccaaggcggatatgttcaccaaacggacgattcgaccggaacgggctgttaccagcgtggatactcctgctgaagctctggcaatctccattggagagcgcggcagagtggatttgccctatatgtcggagcttttaggtacaccaggggaatatgaaaaaatccagcaggaactgcatggtgtcattttcaaagacccgatgacgcagggcagcgaggaaaccggctgggtaacagctgatgaatatctgtccggcaatgtccgggaaaagctccgcgtggcagagttggctgcggcctctgaccctgcctttgcggtgaacgcggaatatttgaagaaggcacagccaaaagacctggatgcttcggagattgatgtgcgtcttggtgccacatgggtcaatcgggattatatccagcagtttatggaagaaacctttgaaccgccgttctatctgcgccgaaatattgaagtgaaattctctcccatgacggcagaatggcagattaccggcaagagtacaccgagccggaacgatgtccatgcctatatgacctacggcaccagccgtgccaatgcctaccggattttagaggatacgctgaatctgcgggatattcgtatctacgataccgtggaggatgcagacggtaagcaaaagcgagttctgaataaaaaggagaccaccctcgcccagcagaaacagcaggccattaaggatgcgttccagaattgggtgtggaaagacccttatcgccgtgcggaactggtggaaaagtataacgagctgttcaacagtacccgtcctcgtgagtacgatggttctcatatccgctttggcggcatgaatccggaaatccggctgcgtgaacatcagcagaatgccattgctcatgtgctgtacggcggcaatacgctgctggcccacgaggtaggtgccggtaagaccttcgagatggcagcttctgctatggaggcaaagcggctgggactgtgccagaaatccatgtttgtcgttccgaatcatttgacccttcagtgggcaaacgagttcctacgcctgtatccgagtgcaaaactgctggtggcaagcaaaaaggactttgagactgcccgcagaaaaaagttctgcgcacgaattgccactggcgattacgatgcagttatcatcgggcattcccagtttgagaaaatcccggtgtccgcagaacggcaggagcggattttgactgcccagattgatgaaatcgaaaatgctattgctgagatgaaatcccagaatggcgagcgtttctccatcaaacagatggaaaagacccggaaaggattggaggcgagattggagaaactccgggcaaccgaccgaaaagacgatgtgattacctttgagcagctgggcgtagaccggctgttcgtagacgaggcacacgcgttcaagaacctgttcctctacacaaaaatgcgcaatgttgcgggcttgtccacatcggaagcgcagaaatcttcggatatgtttatgaagtgccaatatatggacgagctgacaggcgggcgcggcatcatttttgcgaccggcaccccggttagcaacagcatgacggagctttacaccatgatgcggtatctccagtacggcacgttgcagcagaaagggctgacccatttcgacagctgggcttctacctttggtgagaccaccacggccattgagctggcaccagaaggaaccggataccgggcaagaacaagatttgcaaaattcttcaacctgccggagctgatgaatatgttcaaggaagtggcagatatcaagacttccgatcagctgcatctgccggtgccggaggcaaagtttgaaactgtggtggtgcagccttcggagcatcagcaggcgatggtggcggagctttcggaacgggcagcggctgtgcattccggcgtggtagacccgtcggtcgataacatgctgaaaatcacgtcggatggcagaaagctggggctggatcagcggctgatgaatccgctcctgccggatgaccccaacagtaagctcaatgcctgtgtgcggaatgtgcttcgtatttatgaagaaggacagtcggacaagctgacccagctgctgttctgcgacctcagcacaccgaaaaacgatggtacctttaatgtctatgaggacatccgcaccaaacttatccagtccggtgtaccggaggaagaaatcgcatttatccatgatgctgataccgaggcaaaaaagaaggatctgtttgccaaagtccgtactgggcaggtgcgggtgttgttaggttcgacacagaagatgggcgcaggcacgaacgtgcaggacaggctggtggccgtgcatcatctggatgtaggttggcggcctgcggacatgacccagagaaatggtcgtatcatccgtcagggaaatcgaaacaaagaggtgcaggtttatcagtatgtgacggaaggaacttttgatgcctacctctatcagacactggagaataagcagaagttcatcagccagatcatgaccagcaaatctccggtacgttcctgtgatgatgtagatgagcaggctctttcctatgcggagatcaaggcactttgtgcaggagacccgcagatcaaggagaaaatggacttggatgtagatgttgcaaggctgaaagtattgaaggcagaccatcagagccagcagtaccgattggaggataagctgatgaaatatttccctgcggagattgagaaaacgcaagggttcatcaagggctttcagtcggatattcggacggtggcggcacatccgctgccggaagaagggttctgcggcatggaagtgaatggcacatgctttactgaaaaagccgaggccggtgaagcaattcttgcggtctgtaaagccaatcagagtttggagccggtgccgcttggtagctatcgcggtttcaagatggagttgtcatatgacagcttccagaaagagtatcaggtgctgctgaaaggcgagatgacccaccgggtgcccatcggcaccagtgctgcgggcaatatccagcgtttggataatgctcttgccgggattcctgcaaggctggagaaggcggaacagcagctggacaatcttaggagccagcaggaagctgcgcaggccgagcttggaaagccgttcccccaggaggcagaactggcggaaaagagtgcaagactggcagaactggacgcactgctgaatatggatgaccgtgaaaatgatgatccagaccgtgagagaacaacggaaaagccgtctgtcctggcagagctgcgtgaccgtgcagggcgcattccgccgatgacacatcgaaatgatgaggaggtggcactatgagtgttcgggaacactggatcaatgtccgggtaaacccggaagagctggcgaggattcgtgaaaagcagaaagaattggggattcggaataccggtgcctatatgagaaaaatggcgatggacgggtactgcgtaaatcttgatttgtcggatgtggcgcaggtatccacacttcttcgccgatgcagcaacaacctaaaccagtacgcaaaacgcgccaatgaatctggaagcatctatgcggaggatatccgggatttgcagaagcgactggatgaactctgggagatgcaaaagctgatcttaaagaggctttctggtattcgatgacggcgcaaacgtgcggaatttctattgcacatggcacagatgaaacagtctgtgtcattacatattttttgcaggtcttcctgttgacatcgtggtgtttgacaagcgggtacgataaaatgaagatgaaaagaaaaacgaaggggtgaaatccatgaagatcgtatgttttttgttgaagctggtgctgaaaatcctgttgctgccggttgcgtttctgctgcgatttctgtgctttatctggaatctgctgatgcagctatccctgtgggtactttcgctggttatgcttttcgttcttggctgcggcatttattctgtggttcgggcgagctggacggatgtgttcttgctgaccctgattgagatgggactgttcgcagctgcggttggagcgggcggcatcatggaactgatggaacggctgtgcgagtgtgtggaggatgttttgacaatttgagttcaggagggattagatggatattcagtttatgaaagattattatgatttgcggtatgaggaaacagatggagagaatcattttgtggatgaggcagcttatcaggaaaaacagtctgagcaatcgaagatggaagaccagctgatggagatggtgggaggcagcgaatctaatgtgtggaagctgtacgaaagcattatgtgtgtctatttcgatatggaagaaatcatcaagcaggccatttatttgcagggagcttatgaccgggaacagatgttaaaatgagaatagtgaattggtaagagctgccttcgggtagctctttttagatggaggaataaggaatggcggctacaagactaattgcgctgcatatcaataaaggaaagacggtagcgcagtgtctggctgaccgtactgattattctgagaatgcagcaaagacggaagatggaaaatatatcagcgcgtatgcctgtgacgcaaagacctgtgatgaagaatttctgctttccaaacggcagtatgagcatattaccggtagaacccaggcgcatgatgtgattgcatatcagattcggcaatcttttaagcccggagaaatcacgccggaggaggcgaacaaggttggatatgagacggccatgcgctttactaagggaaaacatgcctttatcgtggctacccatgttgatcgtgcgcacattcataaccacattatttttaattcgactacattagacagcaccagaaaattccgagattttcgcttatccggtcttgcactggcaaggctcagtgatatcgtctgtctggaacaccggttgtcggtcattatccggaagccctatgtagagcggcagaagagaacggaatacccggagaaaaaatcgcagcgggatgaaatctgcgagtccattgatgcagcattggcaagaaaaccgaaagacttccgggaactgattggaattttgcaggaagcagggtacgagtataaagatggaaaacagcctgcactgcggggaaaaggccatgccagatttgcccgcttccgctctcttggcaaaggatattcggtcgaagaactctgcgaagtgattgctgggaatgtggttcataaaagcaaatttgcagagaaaacccgcacaagcgataggtcagcacaggtgcatcagaaggcagagctgtcgttccttattgatgtccgtgccaaaatgcaagcaggcaaaggcgcgggatatgcgcgttgggcgaaagtattcaatctgaagcagatggcaaaagccatgatgttcatggaagagcatggaatcaagagctatgcagagctgaaggaaaaggcggatggaatttctgaaaaatgcgatgcgctgctggaatctgtaaaggcggatgaggcacggatgtcagaagtgtcggtgctgcggaagcatctaatcaattatgccaagacaaaagatgtctttgctgcatataaggcatccggctacaatcgggagttctatgaaactcatcgggattcgctggccttacgcagcgcagcgaaaaaggcgtttgatgcctataagaaagagaacggttctgacaaaaagctcccgcgcatcagcgagctgaacgcagagtatgcgatgcttctggaacgaaagaaaagctcctatgcagagtaccgcaagaccaaatcggaaatgcaggattggcttgtggcgcagaagattgtgcaggaaatcctgaaagaggacgagcagaaaaaagagcagctgcatgagcaggaagtgcggcaggaagaagaaaatagacagagtagtcgatgatggaaagtccggtgcagtgtgggtgtaatgctcatgctgcaccgggcttttttctttggcaggaactgccgttgaagcatccggaacggatgcgcagcccgatgccgcaggcagcgttctatggggattggggagtttccccaacaagcagaaaatcgctttcgtgtcacgaaagccctgcttgcagaagagtgggttctaaaaaatcgttcaaaatttggaagaactttcgattgattttgttcgtttcttggagtagaatataaatgagaaattttaacttgctgcgagtgactttagacatcgaaaaagaggttccgtatggatttcatgacgattaagcaggcttctgaaaaatggggcatctgcacaaggagagtacagacattatgcacagaagggcgaattgatggtgccgagcgtttaggccatcagtgggtcattcctattaacgccgaaaagccgaaggatgccagaatcaaaagcggcagatacattaaaacaaaatccggaaatggagagaacgaagatggaaagaaaaccgtatagtgctggagccgtgaaattttcgttctggttcatggaatttcggaaaaccgtgcagcttttgagcgagggtaagagctttgcagatattaaaaagttgaatgaagagacaaacatctatggcgcaccgacaaaactacgagcgcagcagatttattctaccgtaacagcccgtatcaagacattagatgaaagcttttacccaatctttttgagcagtgatcttgctacacaaaaattatttgtgctgactgcggctcttttgcatgacacgctattctttgattttgtgtatgaagtagtgcgggaaaaaatgattcttggttccgatgagctgacggatgcagatatccggatatttttcaaaaataagcaggaacagagtgagaaagtggcttctcttcaagactatacgctgcgccgtctcggttcctgctataagacacagctttatgaagcaggacttttagaaagcaaccgggcaaacagcacaagaaaaatactgaagccaattcttgatattgcatttgagcattggctttatgaccatgaccttggcatcatggtaaaaacactgacgggggtaagatgaaatggatttaagccaaagactggacgagatggagcttgcaatccataagccgtctttccgaaaaggaacaggccgcgcaaatgaggtcaactattgggtgtttgattatccaccggaaaaggaactggaagttcgggagcgcgtagagtatctgaaaaataagaacgaccggggcgatgatgattttgagcttgtggtctttgacctgtatgatatcatcattgactttttggaaaagaaaaacttcatggaaaagtgctatgactttgaaaaaaagcgcggaatcgagcgtatcgtcaaggcagtgaccaactccatgaaggtgaatgacgatgacagcctgatcgtgcaatatatcaaagaacatacgccggagaatgcagtcgtgttcctgaccggcatcggcaagtgctatccgattttgcgctcccacaaggtgcttaacaacttgcatcaggcatttgtgcgctgcccggtcgtgatgttctttccgggaacctataatgaacaggagctgatcctgttcaatgagattaaagatgataactattaccgggcgttccgactggtaaagtaatggatggaggaaactgttatgcagattaaggacatgttccgaaagaaaattgaccgtgagatacagggcgttatcattgtcggtcagggtgaagaaacgaatgtagcgcaggagctggaagagtatgttgtgacccgtgagcttcagcgtcattttgcagatttctttgcagcatataaaaaaggtattcagggaaccacaccgaaaatgggtgtctggatttccggcttctttggaagtggtaaatctcatttcctgaaaatcctgtcctatctgcttcagaataaacaggtcggagacaaacatgccatcgactacttcattgaggatcagaagattaccaatcagatggtgctggcagatatgcagctggcagcaaacaccccatcggacgtaattcttttcaacattgattccaaaagtgattctaatggcaaagaaaataaagatgccattgtgaacgtattcctgaaggtcttcaatgagatgcagggcttctgcggttccatgcctcaccttgctgacctggagcgcaggctttccgaggaaggtcgttttgaagaatttaaggaaaagtttgaagaagagtatggcgatccgtgggaaagctctcgtcaggacttcgatttcattcaggattccgttgtcgatgttctttctgacatggatttcatgagcgaatcggctgctcgtaactggtgtgagaaagcaaccgagggctaccagatcagcattgaggatttcgccaagcgtgtaaagtcttatattgagaaaaaaggtaacaaccaccatgtggttttccttgtggatgagattggccagtacattggtgatgattccaaactgatgctgaaccttcagaccgtgacggaagaactgggcaaggaatgcatgggtaaggcttgggtaatcgtaacgagccagcaggatatcgactccattaccaaggtgaagggtaacgacttctccaagattcagggacgtttcgatacccgtctttctttgtcctctgccaatgtggacgctgttatcaaaaagcgtattctggataagactgagaccgcagcacagagcctgcgtctgctctatgaccagaaagcaaccatcatcaaaaatctgattgtcttcaacgacggtgtggagaaaaaactgtacgccaacgcagaagactttgcagaggtttatccttttgttccgtaccagtttaatttgcttgccagtgtgctgaccagtatccgtacccacggtgcatccggcaagcacctgtccgaaggtgaacgttccatgctggctctgttcaaagagtctgccatgcagctgatggacgatgagatgggggcaatcgtgccgttctatcggttctatgatgcattggagaacttcctcgaccacagccatagcagcgtgatcatccgcgcttatgataacagctacatcaacccggaaaagaaggaaaaagatgtctttgcgatcaatgtgttgaagacccttttcctgattaaatatgttctggagattgaagccaatgtggacaacattgttagcctgatgattaccagcattgacgatgatcgtatttctttgaaggcacaggtggaggatgcactgaaagtgctgatgcgccagatgctgatccagaagaatggctccatctatgtattcctgaccgatgaggaacaggaaatcaacaacgaaatcgaaaaagaaaatgtggagatgccggaggtcatcacgaagattgcggagatgatctatgaggacattttctccagcaagaagtatcagtatcccagctttggtggaaggtatgcgttctccttcaatcaggcagtggatgaccgcccctataaggcaaaccagaattacgatatcggcctccgtgtgctgactccgtggtatgagggcggcaccgatgatggtacgctgcgcctgctctccggccagggcaaggaagtcctggtggttctgccgaacgatgatgcgttcctgacggaaatgcgagcatacttaaaaattgagcggttcctgcgcaagaatacctctgtgcagcttgccaagtatgagaccattaaggaggcaaagcgcgtggagatgcgggaacgcaacggtaacgccaagctttacctgacggaagctctgaaagaggctaccatctatgtcaatggcgatgtgctgcacacttccggcaaggaagtgaccagccgcatcaacgaggcaatcggaagattggtgcagacggtttaccacaagctgtcctacatcgacgcagcgatgggcgaagcagacatccggaagatgttcaagaccagcaatcagctgtcgctggcactgggagataccggagaatccaatgtccacgcgctggatgatgtgctgcaattcgtggcaggtaactcccggatgcacatgaaaacttctatgaaaacgatcaaggatcgctttatgaaagcgccctatggctttgtggaagatgacatccattggctggtggcacgtctctttaagcgtggagatctgtcctttacggtcaatggtgagagcgtcaatctgaacaaccgttccgaggaagaaatcatcggctacatcacgaagaagcagttcgtggataagctgctgacggaagtgcgcgtccgtgtgccggaaaaccagaaaaaggccgtccgcaccgtgatgaaagagctgttcaaggtggcaccgcctgccgatgacgaagataccatcatgaagaacttccagcattactgcgagaatcgaatcaccgagattgagcggctggaaccgaaatatgagaattatacctatccaggaaaagaacttctggaaaagggcaagaagcggctttccgcactggtgcagattcaggcaccgctggaattctttaagaccgtatttgacgagcaggacgatctgatggattttggcgaggactatgagcctatccgtgatttctttggcagtgaacagctgaccatcttcacccgtgcgctggatatgctgaatatctacgaggacagtaagacctacatcgtggatgcagaactggaggacgtggtggccaagatgcgcaccatcgtccggatggcgaagccctataaggagattccgaagctgccggagctgcgcgagaagtttatgaactgctatatgcgcattctggaagagcaggcagagccggtcaaggattccatcaatcaggatcggaaccgtgtctttgaggtattgaacaccaagtcctataaggatgcgaagttcaaccgttatctggaactgtttaaggagatcatggacggtgcggagcactgcaacaatgtctccactctgcgtagctatgcagataaggcggaggcactgaagctgcgcctgcttaatgagatgaacgcagaggatatccgtcttgtgcaggaagcagcagcaaaggccgaggcagagcgcaagcgtcaggaagaagaggcgaaaaagcgcggcgagaccgtgaaaccggaagaaaagatcgcagaaccgcagccggtatataaggtgcgcaccacgaagaatgtttccatcaagacggttgccaagactgcttcgtggcggctggagagcaaggaggatgttgataagtaccttgccgcattacgtgaaaacctgctgaaagaaatggacgaagatacaatcgtcaacattgaactataaatgacaggaggattggctccatgaacaagacagccataaagaattttgcgatttgggcgcggaataagctgattgcagatgtcagctatgatgcccgcctgatcggtattacggaggacggcattgcaaagccgttgccgcagagcttcggcggcactcagttcttcgatatcggcactgcagaaccgtattcgatttccggcgaggccgtgcgccagcgtgacaagctgatagaggtcatccagcagaaggaaaaggataccgactacaaaaccgcatatcagtatgtgatcgaggaggttgcctatacatggtttaaccgcctgatcgccatccgtttcatggaggttaacgactatctgccttcccatatccgggtgctttcttccgagagcggaaagatggagccggatctggtcacaacaccgtttgacgcagagctgcccttcactgcggaggaagaggctcagattttccagttgaagcaggacaacaagctggacgaagtgttccgcatcctgttcctgaaacagtgcaatgccctgaacgagattctgcctgctctgtttgaaaagacaaagaactacaccgagctgctgctcagcttgtccgttattgaccaggatggcgtggtctatcatctgattcacgatattccggaggatgacttcaacatcgagcgcggtggtcaggtggagatcatcggctggctgtaccagtattacaacactgaaccgaaagcggctgcctttgcaaagaacggtaagatcaccaaagaggaaattcctgccgtgactcagctgttcacaccggactggatcgtccgttacatggtggagaacagccttggccgtctgtgggtggaaggacacccggactgcggcctgaaagaaaactggaaatactatctggaagaggcacagcaggaaccggaagtgcaggtgaagctggcagaaattcgtaaagagtacgccgccctgaacccggaggatataaagctcattgacccctgcatgggttctggtcatatcctcgtatatgcctttgatgtgctgatgcagatttacgagagtgccggttacagccagcgtgatgctgcaaaaagcattctggagaacaacatctacggtctggacattgatgaccgtgcctatcagctggcgtactttgccgtgatgatgaaagcacggcagtacaaccgtcgtatcttaaacggagaaaacacctgtcatgtctatgccattcaggagagcaacagcgtcaaccgtgcgcacttgaaatatttcggtgcagggatggacgatatcgaaaagaacgccgccaagatgcagctggaaggtctgctggacaccctgaccgatgccaaggaatacggctccattctgaatgtggagagctacaactgggatttgctgcgccgatttgtggcagcggaagataccgacggtcagatcagcatggacagcgtgggtgtggaagataccgccgagcagctgaaccgactcatcgatatcggtgagacgatggcgcggaaatattgggtcacctgtacgaatccgccctatgccggaattagtggtcttagttctaaacttggaaatttagcacaaaaagaatatccgatagctaaaacggatttatactcgatttttattgaaaggtgtaacaagtatactactcaatctggatttcaagcgatgattacccaacagtcatggctttcgttgccgtcttttgaagatttaagaaaaaaggtatgtgcaaacaatcaaattgttacattggcacaattgggagcgcatgcgtttgacgagattggtggcgaagtggtttcggttgtctgtttttctcttcgcaaaggttatcaggaggcatacataggaatttatgatgacctgcagagagggctcagcgaaagtgagaaggagcagttttttctgagtgtagtggcaagatattattcaaaacaagataatttcagagaaatacctcatgagatcgttgtttacgatgcttctccaaaagcccttgataacttctcgatttttccacctttaaaagatactgctgtggcaaaacccggaatgcagacaagcgacaatgatcgtttcttgaggttgtggtttgaagttctattttctggaatagggtattctatgacccatgagcaagcgcaggaaagtacttttaagtggttcccttacaataaaggcattggatatagaaaatggtacggtaataacgactatatcgttaatttttataatgatggcgaggaattaaaatactggcttgttcacaatccaaaagatccgggaacaaaacactggtctcgaaatatgcgaaattatgattgttattttaatgatgggattacattcactgctattggaaacagtttttcctctcggttaaatggaaaaggctacctctttgacacaaaggggcctactatgtttggagaacatctcgtatatgtgtgcggttttgtgaattcaatcgtgtttgattattataatcgtatgctatgcaagcaattaaccaaatctggagattcggttaatcttgtgccgttttgttatgattatcatgcaaaaaatatagaagatacaattgaagcaacggtttcactttcaaaatatgactgggactcttttgaaacctcttgggattttaagaagcacccattgctccgcaatgtttccacgatttccgaggcctttaccctatggcagacggaatgcgatgaacgttttacccagctgaaagctaacgaagaagaactgaaccgcatttttattgacatttacggcttgcaggacgagctgaccccagaagtggaagataaagatgtgactgtgcgcaaggctgacttgcagcgggacatcaagagcctgctcagctacgccgtgggctgtatgtttggtcgctactcgctggataaacccggtcttatttttgcaggtggaaactttgattctgtctattggaaatacaagggacaggctgcactggatgaaaatgatagcccaattgagggtgggtatgctggtatttcgctggcagagtaccattatccaaagttccacgataccgatgattgggaaacggcaacatggctttcctatgagccagatgtagacaatgtcattcctatcaccgatgaagaatatctggacgatgatatcgtttcgcgcctgtgtgcatggctgaaaacggtttatggtgcagatacgctggaagaaaacctcgattatatcgcaaaagcccttggcaataagggcagcaccagccgggagattatccgcaactacttcctgaacgacttcttcaaggatcactgccagacttactctgtcactggctccggtaagcgtccgatctactggctgtttgacagtggcaagcagaacggcttcaaggcactggtttacctgcatcgctacacgccggataccatcggcaacctgcgtatcgactacctgcacaagatgcagcgtgtatatgaatccgagatcaaccgaatgcaggatatgatggatcacagcgagaatgcccgcgaagtggcagcagccgggaagcgcaaggataaacttgccaagcagttgaaggaatgtcgggaatacgatgagaagatcagccatctggcactttcccgtatcgagcttgacctcgatgacggcgtaaaggtcaactaccgcaagctccagaccgcccaggacggcaagttctatgaggtgctggcagacagtaagaatatcatggtgaaagaaaagaaataagaaaaatgaccggagggagtgggaaaatgcaaaatcactggacaaaggatgatgtcgcggcggcatggcagcgttttgaacgtacatatgcccatgatccggtggcataccgcttcctctgcggtcattgtattcaagatgaaaccgatgaagatgcgttggattacaatatcattggtgtctggcttgtctgtcatagaaaatatcgtgactggtcaaccgagaaatcctatgatttggcatggatactggaatttatgcaggcgtatcacatgacgattccacggtacatcaaaagaacaaagttctaccggaaaaagatgaagctattgctgagttctcttgtaagagataaagaccaatcacaggaaaaaaggacaatgatatggcagaattgaacctgaaacaaattatagaccgcctgaatgcggaatttaccggagagacccggaaactggttttctggtacgatgataaggcagaatttgctgaggatatggagacagttgagcttcagaatgcgaagatctaccatctccagccggataaccagttctatacaaagtattttctggagcgtgtggataagaccacgaattatctgatctatgcaccgtttccgaagccggatgtaagggacaaccatctggaagacacaatgctgtattccagacggttctttgctgaccgtgcctccctgctgtcggttgacctgggtattgaggaaaagtacaagccggttattgagaagcacatcaagtttttcgccaacaaagagcgcactcagcggttctatgatttggaaatcgaaaacttcaatgaagaaaatatccttgtcggtctgctaagtgcagtctgcaaggcgcgtacctgctcttttgaggaagtcgtgcgcatcgtgttgacagatggcgagttggtggacaatgctttcttgcaggagtttgaaaaatacgacctgctgtctgcattctggcagctctgtgagcagcatttcggatacaccgatacaaaaccgagtttggaacggctgctggtaacattgttcgttacttatactgggcgatatgtgcaggcagagcttccggcagcatggaggagctttgtctcctacaagtcaggcaatatcatcgcattcctcgatagcctgatgaacagcgtcctgtaccgggataaatacgacgctttgtcggcacatgttgccaaagggctgaatgttttttcggcatttgcaggaatgcgagtggacgatttggtggagtgtgacactttccttgccgtggatcaggtgctggtaaagtggctcattagcagacttgtttcggaagatatcggtgcaatcgtaaacggatttaccattccggaactctgtgaaaaacgggctaaaatgcactttggcagaaagactgggaagacctatcagctgctttccagtgcatacagcatggtgaaggaagcggattaccatgccgcagatggcttaaagccaattatcgaccgatatcttgctgcggattacaatatggatcagcagtatcggaaattctactattattacgaccagctggagagcacggaaagctttgagccgcttcgggaactggtggaaaatatctacacgaacgaatatctggcttgcctgctccctgcctggaatgctggaatccagcaggatgccgcattttctgcaatttcgttgcagcgggagttttacaatgccaacctgcgctataccaaagaacgcaccgtggttatcatttcggatgccatgcgttacgaggtcggacaggagttgtttgccagaatgcaggatgacccgaaatgcacggcaaaactttctgtacagttgagtgtcctgccgtcttatacaaggctcggtatggcagcacttttaccgcataagacactggaaatgacggatgattttcaggtactggcagatggtatcctttgcgataatctggccggtcggcagcaagtgctgcaaagctataacccggatagtgtctgtgtacagttcgatgatatcaaaaatttgaaagtagcagagctgcgagatgtgctgacaaagcgtcagattatctatgtatatcataatcagattgacgcgcgcggagacaaggcaaataccgaggatgaggtgtttcatgcgtgtgaggaggccgttcaggaaatcatggacttgattcatcgaatctccgtcagcggcaatacctatcattttatcgttactgccgatcatggctttatttacaagcgtgataagctgacagaaagtgacaaaatctccgggaaaagcgcggacaaagcatttgtcaatcgcagatttattgtgtccaaggcggcactggaagacgacggcatcgaccatatgagcatgggacgcgttctggggaatgaggacagcaaggtggtgtcctatccagtcagcagcaatgtctttaaggtggccggaggcggtgctaactatgtgcatggcggttcctcaccacaggaaatgctggtgccggtgctggagtttaagatggagcgcggtcacatggaaacaaagaatgcagagattgctctggtcagcatcgtccataagattacgaacctgatcacttccatggactttatccagtcggatgccgttagcgatactgtaaaagctgcaaaataccgcattttcttcctctcggaagacaatgagaaaatctcgaacgaaaacagttatgtggcggacagtcgtgaggaaaatgcgcagaagcgtatcttccggatgcgtttcacattcaagaataagaaatacgacaaggacaagcagtattaccttgtggtttatgacgaagaaagcggtctggagcagtggaggcagcctgtcatcatggacattgcctttgcagatgacttcggattcggattctgatacagaggaggcaggaattccgtatggaaatgatggacatggcggcagacgatacccgtgaagaactgcgccggaagctgcgcagcaactttgacggtcggatcgtccgcaaagacctgacaaagaaaataaaagaaggagcgaatgttccggtctatgtgctggagttcctgctgggtcagtattgtagttcagacgatgagacaatcattgagcagggcgttcagaatgtgaaacgcattctggcagataattttgtccgcccggatgaggctcagaaaattctctcccagctgcgcaagaacgggagccataccattattgatatggtgacagtgcatctggatatcaaaaaggattgcttttttgcagagttctctaaccttggcctcaccaatgtgccgattacagatgattatccggaaaaatatgaccggctgctttgcggcggtatctggtgcatcgtgcagctggaatatgagtctgagggagacagcagctttggaatcacggatatagatggacagccgatttcttcaaaacagaaaaagcagaaggatatctctcccatcagcatccataagctgactccgattcagatgccccatatcgacattgaagaagttcgagagggacgcaaggcattcacacaggaagagtggatggatgttatgctgcgttcctgcggatatgagccggaacagttgaacaatcgggaaaagtggctgctgcttgcgcgtatgttaccgctggtggagaacaacttcaatctctgtgaactggggccgcgcagcaccggtaaatctcatatctataaagaaatcagcccaaacagtatcctggtatccggtggtcagacaaccgttgcaaatctgttttacaatatggggcgcaaaaccgtaggtttggtaggcttatgggactgcgttgcctttgatgaggttgccggaatcaagtttaaggacaaagacggcattcagattatgaaagactatatggcttccggctcctttgcccgcggcaaagaggaaaaggcagcatcggcatctatggtctttgtaggaaatatcaatcagagcgtggatgtgttgctcaagacttcctctctgtttgatccgttcccgccggagatgggaacggacacagcctttcttgaccgtctgcattgctatattccaggctgggagattccgaagttccgtccggagcacttcaccaacgactacggctttatcacggattatctggcggagtttatccgagagctgcggaaagaacagtatggtgatgcgttggataagtatttccgccttggaaagaacctgaaccagcgcgatacgattgctgtccgcaagattgtaggcggctatgtgaaattgctttatcccgatggagagttcacgaaggaacagattgaagaaattcttgtatttgcactggaaatgcgccgtcgcgtcaaggagcagttgaaaaagttgggcggaatggagttctatgatgtgaacttcagctatatcgaccttgatacctttgaagaaaaatttgtttccgtgccagagcagggcggtggaaagctcatccccgatggcatctgtaatccgggacaggtatataccgtaagtcagggcaagtccggtatgatcggtgtattccgccttgaaagccagatgctgcccggcaatggaaaatttgaacgtactggccttggcagcgaccgtgactgcaaggaatccacgaatacggcgttcaatttcctgaaagctaacggaaatcgtatcagtggcagcatcagcaccacgatgcgggattacatcatcaactatcaggatttacagggcattggcatgaccggaaagctggcattgcctacattgattgcactatgtagcatcgctcttggacggcctacggtcagtacacttgccgtgctgggagaaatcagtattagcggcacgattctgaaagtggacgagcttgccaatagtttgcaggtatgcctcgatagcggagcaaagaaagtgctgcttccgattaccagtgcagcagaccttggcaccgtgccgccggagctggtgggcagttttaatctgattttctacagcagtgcggaagatgcggtgtttaaggcgttgggggtagagtaacatggcaagtaaaatttgcaagattgtttattttgatgaggattcggtgacagattatgttcagattgttgctggaggaacgcttgagaaaacaacagagctattaaattcaagtgatttaagtgaagagcaaaaagcagatgtttctgccaaggggggaatcggcggagtatttaaggccttacttggttgggaagcgtcggcaagtggcgaagtttctgctggtttagcattgaatcgcaacaaaatggtaaaaaacatagtgaagaatacgattcttacagactttttacacatcattgatgaaaacgaaaataaaagtgcttcaaaaacaacaagaggagctataaaaaagtttgaaggatatgtcatatcggcagagaaagattctctttcctatatggttatggtttcgccatacttatcaatgctgcgttcaggatcgtcaataccggctggcgatttcaatattgcaattgataagcttgagaatgccttgaaaaatgcaaaaggttactatgaatttgtcggcactaagggaaaaagtaaggtcatactacgcttcaatataaattcgtttaagaatgggtatacaattagtgatttgttgaaaatgaatttaagcatctacgcaatcaaagtaggacgaacaactattgatatgctaaatgtgagtaaagaattggagatggatgtttctataataccgaaggacaatccgtcatacgaggaaagtaatgaagtggaagacacgtcgacttcatcaaaaacattagatgtattcgatgttttgcttgcgggggtagaagctgttgattgataaagttgttgtgtttactgggtcgaaaaaggattttgaaatttttcttgagaaacagattccggaagactccgaaacaattccttttatggaactgattcagcactataatgcacggcttagaccaaatgaatctggagttcgcgagaatgcattgagagctaacatagaagtagacaattgcgttgttagggcggatgattatggctctgtaatgccgcatgttttgtcgaattttgccaatattgtgaacctcaactatgatatgggaacactgtatattcaaaatccgcccagacgtgtgctggaatcgttaaaggcagggcttgatggggatattgaatattatggaagtcagtaccctgaattggatagagacgcattaacaaagatatataaagcattgaatagtgatgtttatgggcaggatgagtgtaaaaaacagattctaagtggaatgtatcgtttgactactggtgcaactaataaaccagttgtacttatgctctatggaccgtcaggagtaggaaaaacggaaagtgcaaaaagcataagtaaatcgctgggtggagagttattgcgcattcagttttcaatgatgcagacatcagaagcatatgattacgtttttggtgcagagcattccaaaagcagttttgctcgcgatatgatgggacgagaatcaaatgtaattttgattgatgaatttgataaagtgaatcctgcgctatacaatgccttttatgaattgtttgacgaaggcaagtatgttgatacgaattatagcgtcgaacttgggcaggcaatttttcttcttacatgtaatttctcaaatgaaaatgaaataaagaaggcattagggccagcaatgttttcaagaattgggtgctgtgtcgaatatgctgatttaacagtggagcaaaagcagaaaatcgtgaataattggtatgattcaattatggcttctttgaaggatgatgaaagagtatatatcgaaaccacagatatacatgagtggttcctgaaaaatgccgagagatacgataatattcgtattttgaaatcaaaaatggaaaatgcaatttttgaaaaattaacggatcattttattattatgacaggaagtatggcggaaggcacacaggatcgtgtgtgaagagacaagagtacatttctgttgcgcgaaagtatgtggattgttaaatgatttttggttatattcagtggctaattgagtcgtgaaagtagtttggacaagcatacgagggggaatcgtcatgaccaagaagaaagcctctatgtcacaggtgctggcagatataaagccttatataacgaaaaagttcatggcggcaccgtgtattaaggagcaagacattcaggctatctgtcaaattctcctgcccagatacaagaatgtgcagctcatgcaaggactgaccaacaacaagccggattttagaattcaggtgaaaggtctgttcgggacggaagaaaaacggtttgaagtggttggtggtgataagaaaaggtcagcagcaaagaagaaatctgacttgggctggattgataggctggaagagattgatgctgcgctggatgatttctgatatcaatgcagcgtggagagttatctgaggcaaaactttttgcaacaggttgttgcaaaaaaccacacataaaacagcggggaagcgatggagtgacacgacaagaattatttacatggatacgtcagcagtacggcacagaaccggaatatccctggcatgactggaatgcagtgctgcggcacaacgacaataataaatggtatggtgtggttctggaagtatctgctgataagttgggattgccggaggtaggcatcattgatgtacttaatgtgaaaagcgatccgctgttgatcggctctcttcgcggacagaacggctattttccggcctatcatatgaacaaagaaaaatggctcagtattcagctcggcaaaccagaactggatgatgccatcaaagacctgctttctttgagccatgagctgacagcaccgaaaaagcgaaatagaaagttaccagcaaataatccgggagattccgcaaatggcaaagaaaaagaaactgacaaaggctgagcgaaaggaagcacgcctccgaaaaggcaagcagtggctgctcacctataccggctcaccgaaaaagatgaacaagcattatcgggaacgctttcatgtggatgctgtgactgccgctaaagatttgcaggagctgggggtcaactatacacaggagcagctcgaccagattaaacaggctgaagaacagcggctccggcagcggaaaatggagcgggaagcgaaagaacgggaacagctggcagaacggtatgaggactgcgatggtcgttttgcttttatcgccggatatacagatggcggcgcaccgtatggtgtgatgtgggaagaagtaggcattgatccgggactgcctttcgaggaaaaagtgaagctctatcacatgcaggtgttagactgataattgtgcaagcaccgcctgcacaattcgcaacaaaaaaagaggagccagtccaggctcctcaaatgtacattatttcaagaagttgctcttatgttccagtgcgtgcagattatagccaagtgtggccaggtgcgctaccttcagtgcaaccagattgatgtcggtggacatcgcgctggcgatctgctcggctgtgtatccatactcatagatgtaacgaaggacttcatcgctgtccatcaggatttctgctgctacgatgttcgcttcatattccggtttggatttcatgtcgtagagcatgaactcatgaatcggggtggttttcgccatattccggtgaagctggtcatgccctaattcatgtgcgcacacgatgcgcagcatattttcatccagactgttattcaggaaaataaagcgatttcgcttaatcacccggtacattcccttcagggaaccaaatttttcgcaaagcatgacattgataccaagctgccttgcaatttcaaaagggtctctggaaccgcagcgttttaccagtttttcaccgacccgtgaaagctgttccgcattcatcataccacctccagtttacagtatagcgaaaagtgtgtacgataaatatcactgatcggattttttacgcctcgttttcggggcgtattttttattgttctctttggcaatccagtaggcatcggtcagagctttataagctccttcgatggcatcttcgcttaattcgccgccagcgaacataccggtcacttcgctgaccagttcttcaatatctttcgctgcttttgcgccgcctttttcatgagcttctacgacataggtgccgctgcttcccagcaggtactcagtagtagtattcagcgcatccgcaatcttctggatcgtgaccatattggatggtttgcggctgccaagctcataattctgaattgtgcgggcggttacaccggccttctctgcaagttctacctgagttaaattggcttctgttcttttttctttcaacctttctttgaagaccataggaatacctctttcttttttgatgacgaacacgaacactttttcataaaaacctattgacacgaaaaactgtgcttgctataatgacgatgaaaacacgaaatacaattcgtgtaattatagtatcacaagaaatgctgtgtgtcaatgcgttcgtgaaaagttgttcgtgctttcacgaacggagaggaggaatacgggatgcaaagagtgattcttcactgtgatatgaataatttctatgcctctgttgagtgtatgctgaacccggaactgaagaacaagccggtggcagtgtgtggttctgtggaggaacggcatggtatcgtacttgcgaagaactatgcagcaaaggcgtttggcgtttccacgggagaggcaatctggcaggcaaaacagaagtgccaggatcttgtgatcgtggagccgcattatgagcaatatatgaagttttcaaaattagcccgtgagatatacggtcgttatactgaccagattgaaccttacgggatggacgaatgctggctggatgtgaccggaagcggctgcatgggaactggatttgaaatcgcagatgagattcgcagaaccgttaagtttgaactgggacttacgatttccgcaggagtgagcttcaacaagatttttgccaagcttgggtcggatatgaaaaagccggatgcgattacctgtattgaagcagattcattccgtgagaagatttggtgtcttcctgcctctgacttgcttggagtcggcagagcgaccgagaaggttctatccggttatgggattcataccattggagagcttgctgcaacatcggatgatttcttgaagtgccgccttggaaagaatggactggcgattaagaaatatgccaatgggctggatgattcgccggttatgcgttccgattatgtctccccggtaaaaagcattgggcacgggatgacgaccatgcaggatttggagaataacgccgaagtctggtgtgtcatgctggagctggtgcaggagattggaaccaagctacgaacacataagaagaaagcgggcggaatagcgatttccatccgcaacaatgagcttttcacgaaggagtggcagtgccggattagcattccgacacaaagccccacctatctggcgaaaaccgcatttgctctgtttgataagaattatcagtgggaacacccgattcgttcggtgacagttcgggcaatcaacctgtttgaagaggattgtccgatacaatacgacctattcactgatgtgaaatcactggatcgtcaggaacgcttggacgcagcgattgagcagattcgattccgattcgggaaagatgcgattaaaaatggggtactttttcagaaaagcaagatgccgacagagcgaaaagtggatttggttatgccgacaggaatgattggttaatacagcaccggcagaatctggtgagttctttgctaaaagaagtcaacacattcgccggtttacagagaaggagcgtagaatatgtcggaacagaaatgtagaaaagtatatgtacctgtgaatttagatgtggatgcagagggaaatatccgtccgcgtctgattcggtggattgacggacgggtgtatgagatcgaccgattgaagcataagtgtcgggctgcttccacgaaggtaggaggctgcggaatccgctatacggtcatgatcggtgggcatgagagcttcctgtacaacgaagatgaaaaatggttcgttgaagcaaaggagcagtgcctatgatcctttcgcagaaaaacatagaggaaatcgctgttgcagtgataagagattttcaaaagtcctttttcggcagcgaagcagatgatccgacgagattcgcgcttccgacacccattgaccagtttgcatccgactatctgaacctgaaagtgtcatttcaaaagttgtcctcggacggaagcatctatggtctgaccgcgtatgtggatacagaatatcagatagaggttgatggaagtcagaggagcattttcctaaaaaccaatgatgtggttctggacaagggctttattgaaccggagaatattcggaaactctgcggaaaacgcagatttacgctggcgcatgagtgcgctcaccagatactgtttcagctggattccgatgaccgaaagatagcctgccataagagaccggaagtgcgaggaaatggctcccgcgttctgaggacgcaggaggattggaacgaatggcaggccaattcgctgggagctgccatcctgatgccccagtcagaggtggatcgggcgatgtggttcattaacagcagaaagcctctgacctgttatggatggcgtttttacgacagtgaccaagtgaagatagataccttctgtggtgtctttggtgtttcgagatcagcagcagctatccgattggaacaactgggctatctgaaccggaaaaaggattatgaatatcgtgatccattggaggtgtggccatgagcaggaatatcagagtatcggaaccatctgcggaaatgcagattaaaatcatccgggcaaaggatgcgattgcttcgcaaaagcccaggattgtcaggtgcccttattgccgacacaattcaatcatcgtctttgaggataccagaggacatgtgcagaccaaatgtaaggcctgcggacgcgagaccgtcttcaatgttttggagatgagaagattacggagattgcagctctactattcgtctttgaatggttgagatgacaataaataaccctattaacacaattttataagtcatagctgtgctgtggagccgctgacaggcgaagtcttccgaatgccgcatgagacagaattatgggatacccatgttctgttttatcggcacaggatttttcttcaccgtcatgcggctcttttttgaccttccgtcgatccggttctgtaccggctgtgcggaaggagaaacgtatgtattttgacgcaaaagagtttggtaagagacttcacgatgttcgcacttcccgtggcattacgcaggaggaactggcggttcgcctgggcctggcaagcaagcagcatgtcagccgcatggagaacggtgaacgcagctgctctattgacttgctgattgaactgtcctgcatcctccatgtcagcacggattatcttctgatgggcagcgagccaagcaaagaggaagtcaaaaatgatcttctgagcattatttcggagctgtctacgattgcgaaaaaaatctaaaaagcattaggtgcaatataactgctgacggcgtagaatcatggtggctatcatggtggataccttgatgggtgtcatcctctaagttatcatgggttgcgtcataggacttatcattggctgtacccatgatagagtgagcatgagtgatttgagcaccctcactgccgtgggcaataaggtggatacaaagattcaaaactgtgtgtgggatgtccggcgatttatcttgctcactaacttggtcattgactaagtttttctgactaagttggtaatttacatttttcaagatgactctgaaatctgttgccgttgagaaaattttcggattatatgccgctgtatatccaggcggcttttcggtttccctgacgattttgcgtaggccgcttccatgacgctccatgtatttcatgcggtggaacgggtcagcaatcacagggcttgccatattgaacggatactttttagtgtcaaaaacaaatcagaaaataaaaacggaaaatccgttgatattttcttatttgcggcgtataataagactataagaaaataaaaacgaaaaaactgtttttagaggaggactacctatgaaaatactccgcatcaccgcacaaggactcccattattcaaaaaagacttggatatttgcttttatacgcagcaacgtgtttgcgaagaggacaaagatagtctttaccgtttgacggataactactatctccactctgcctgtgctttcattggaattaacgcatctggcaagacctcggtattaaaggtcattagcttggccttaaatattgtgaaaaatgagcccatcaatcatgtggaggcaaaaagcattcttggcggagcgaagaatgttacaatccgcacatatttttatgataagcgtagctacgtctgctgcttggaaactgtaattgcggcaaagaagtcgaaaacaggggaatatgtgtattcgattctgtctgaaagcctttgggaaaaaccgattgcaaccgttaagtcgaaaaagtatctgacagattttacaggaatgaagcctgtagagcagcgcaatagcgatgaagcatacctttctgatgatgtcagctttgtcattgcacataataaaaaagcgaatgatacagtggaaatattcagcctgctttcctatacgaatgtgaatgtgcttccatttaccgaagatattccattggaggtaattgcatttctcgatccgaccattgagaaattgtgttttgagcagacagagggaaaaacatttatccacttgaagtttaaggatgaagaagagattatcctgaataatccggcagaccttgagcagtatctgtcctctggtacgattaagggtattattacattctcgatggtaaaggaagttcttcattcaggtggttatcttctggtagatgaaatagagaatcatttcaacaaggaaattgtaacgaccttaatgcgcttctttatggacagccgactgaacaaaaatggcggaacgcttattttcactacgcattatccggaactgctggacgaatatgaccgaaatgacggaatttgtatcgttagaaaccgtaatggcattacagcagaaaatttgagctatatattgaaacgtaatgatattaaaaagagtgatgcttaccagagcggcttccttgagggaacaacgccagcatatgaagcgtatatgcgcttgaagaaaagcctggctgcttcaatcaattaaggaggcggcagaatggaattagcaaaatacaaggcgtgtatatgtgaaggctctgccgaagaagctattatcgacatactggttgataatgatcttctgattttcaacagagaagaaatgttggaagaacgtgttatccgttgcagaagtgctaaacgattcgaggagcgatacttacggaaaggattcgatgagcagatttcggtgatacggattttggattctcgtagagaggaatttcgattgagtaaagcatatgagcagaaaattgacgtggtaaatgtcattactgctccagaaattgaaatgctgattattcatgcggaaggagcatatgatcagtttaagcgttctggaaaaaaaccaagcgaattttgtaaaacaaatcttcggatgcatgatgtgaagtcgtatgattttgtgaagcagtatttcagtaatcctcagctcttggtgaaagccataaaagagtatcgcagaacagccaatatccccaaaggagaatacagcttgtctgatttgctgagatgagcgttgcttttttgatacattagccgtgactcaaatggtcaccaggagataaacgggtaccagtttacagaaaacagaatagaatcgtctttgatgcctcgttgggaaaccaacggggtatttttttgcctcaatctggctgtatagaacactgaaaaagtcaaaacgaaccgtatgtagtcctgcaaggacaaccaaagtgcgcctacgaggccaacgcgaaaccggaggattcttgttaaacttactttgtaaggacgaaagtccggatgtcccttgaaaactgaatactcattcttcaggtacattcctgtttggtcaagccttcgactgcacgccatgaagcccatcggggcgatagcggtttcgcagaagcaaatgccgaattgcaaccggcggcggtgttaaagccagacagggacaatgatacttccgtaattcgcggtccggccataaggaaggcgggatggttaaataccaatggagcagtgaagcacactgccgcctgtgagaaatcctacatctctggggtaataagaaaaagtacagagaaaccatattttcagaaagcgctgccgggtgctgtatcagcatgatacctggcaggctttatccatatcagtgtatggagattggagacaacagcaaatgaaagaaaattgggtttatcggcgaggtgatttatatctcgccaatctcggtgttccggtcggatcaaagcagggcggtgttcgtcctgttgtggttcttcagaatgatgtcggcaattattattcaccgacgatcacaattgctccgctgacatcgaaaattgagaagaagcgaaagcagccaacgcatttctttctccgtaaagcaaagggactgggaaaaccgtctatggtattggcagaacagctcgacacctgcgacaagatatgcgtgattcgctatcttgggcgggtaagtaaggggcagatgcgtgggattgatgaagctgtaaggattcagcttggttattacattccggaacagtcagagaaaaaaagacagggcaaatgccgaaaggatggcgaagaaggcgatggataaactgattacaaggaaggaagcagccagtatactgggaatcagcgtaaaaacactagatgctgcaagaacagacggtttgatctcctatgttcagtatgtggaaaacggctgcgtttatttcacggaagtggggattcaggagtacattgcaaaatgtacacaccgtgcaaaaccgatggaacgtgctgcgacatatcgcaaacctcgaagctttcggcggtgaaaatcgacatcgttgagtatggacgatgaatccgcaataatgaaagcaacaacagaattggaggtaatgatatggcggcaagaagaatgatgcttcccgattatggtacggtgagtatgaagggaacgcagtattatcgaacccgtgtaacagatcagcaggggcggcgggtttccttatatgcaagaacgagagaggaactgtaccagaaggaacaggaagcgatccagcagattgagaacaagacgtatcgccgcagtacacctacagtggaggagtattgcgagaaatggctgctgatgcagtcggcacagatcaggatgacaacgctgattgactatacatcgaaagtgaagaactacatcattaagccattgggcgatatgcatttgggagatgtaacagcagatgacattcgtctggcactgctggcggcatcaaaaaagtcggcatccgtgtacaaatcggtgagcgttatatataagtgtatttttacggcagcaatggagagcaagatcattgatgagaatccgaccatctatctgaagaagaatgtgggaggaattccccagaaggaacgcctcccgcttacggatgagcaggtggataagctgctggatgccatttacggcttgccgccgtatgtatttgtgatgctggggctgtacgcaggattgcggagagaagaaatcctcggacttcaatgggattcggtgtatcttgattgcgaggctccgtaccttaccgttcggagagcctggcatacggagcataatcgtccggtgattctgacagagctgaaaacaaaggcagcgcatcggaatgtccctctgccggacaatcttctggactgtctgaaagaggcgaagaagacatcgacatcggattatgtggttgcaaaccgggatggagacccgttgtcctatacgcaattcaagagattatggcagtatatcgtaacccgtaccaccaaggaacgctgctattatcgctatgaagatggcaagagggtaaagcatacggtgaagccggttctggggcaaaaggcagcacacaatggaaatgtggtttacagtctggactttgaggtgactccgcatcagctgcggcacacctacattacgaatctgattcatgcttcggttgatccaaagacggttcagtatcttgccggtcatgaaagcagcaagatcaccatggatatttacgccaaggtgaaatataatcgcccagagcagctcgcaggagtgctggaagatgcttttgcatcgtgggattaagagtaaatcagaaaaaacttggggcagggagggtcaaaaatccctgccctttttacatacattcgacatccttgaaggaagtgctgtacgccatgataataaaagtgacaacacgcaatgtatgaagatagataggaggagaacacatggctaaagggaaaaagcgtcctgctgaacttccggaatacggaacagtgatgatgaaaggggtacagtattaccgcacccggattacagatgcagacggaaagagagtggcgatttatgggctgacacgcgaagaattgtatgaccgagtggaagatgcccagaagaaaatcgcggaagtggttttccatagagagaatccgaccgtggaagagtactgtgaaaaatggttgctgatgcggtctggaacggtaagaactaatacgttggaaggatacgcacggatggtgaatcggtacatcgtgggtccgattggacagatgtatatggacgaggtgaccacagatgacctgcggctgctgatggttccgttatcaaaaggttcttccggaatgtatggtcagctcaatatgctgattaagaacatttttaattcagcagaagagagcaaggtgattaaagagaatccatccaaaacgatttgcgcaagaggcggaaagccagcgaaacggcgcgaggctttgacggatgaacagactgccattttgctggatagcattcgtgagcttccaccgtatgtcttcgtgatgatcggtttgtacgcgggattgcgtagagaagagatccttggattaaaatgggactgcgtattcctagatgaaaaaacgccgtacatttcggtaaggcgtgcatggcatgtggaaggcggtgagccggtagtcaacacgctattgaagacaccggcagcaaaacgagatgttccgattccaaaatgcctggtagcctgtctcaaggaagaaagggaaaaatcagaatcggaatatgtgatctcgaattcgaagggaactgttttgacggaaacacagtttgtgagagtctggaagtacataacagtccgttctactgcagaacgctgttattacacttatgtaaatggacagtccatcaagcatagaataaagccaaggcttggtgagcatcagccgaataatcccaaactggtgtatacgatggacttcaaggtgactccgcacatgctgcggcacacctacatcaccaatctgatttacaaaggtgttgatcctaagacggtgcagtatctggcaggccatgagaacagccaaacgaccatggacatctatgcgaaagtcaagtataataaacctgaggaattaagcagcgttgtgaatgctgcattcgggctgcgttaaactgcaccaaaaatttcgcgatttcgtgggtttacctatgggtttactgagagaggaaagcccgaaaaaccgcatgaatactggtctttttggatcaaggtcaggtgagtacggtctcagttcccttaccgcagccacgatggcgtcgccccgcaagccaaactgttccagcagatcccgggccgggcccgagtgcctgaacgcatcccggacccccacccggcgcataaaagtggagcactgctccccctgcacggcggccactgcctcaccttttatgtaaaaattcgtctcttttatcacatctttatggtaatcctcccatgcctatgctagaataaaataataagagttcgcactcttcgatgttatcgtcatcgcacagtcatctgtctctttgtcagccggagaaaacgcttcgcctgcgtcggccgggacggcgggctgtactgttttcagtcatttttggaggtcatcacccctacaataggatttgcgcaaacatgaaaaaggagatcccgttttctcccggcaaggcgcctcgggagggtttgaacaaaaaaagcaaggcacgttccgcaagtctgtgggggtatctgctgatcctccccagctttgcaggggtgtgcctttttcagttgttcccctatctgagcagcctgctctacacctttacccaggggatcgtaacgccgcaatttgtggggtttgaaaactttgccgaccttctctccgacccgctgtttttgcaggcagccggaaacactttcctgtttttgtttgtaggcggcatgattttgctggccctttccctgttcatcagcatcatctgcctaaaagcccgattcacctggcagcgctgggccattttgctgccgctggtggtgcctgcggccagccttgccctgggttggcagtctatctttgggcaggatggactggcaaaccatattttgtcccgtttgggtttgcccgccggggattttctctatggggaggccgccttcccgctgatggttctcttgtatctgctgaaaaacacgggatacctgagcatcattctggcggacgccatccagcgttttcccccggagcaaaaggacaattacctgctggacagcaacagcgagacaggctatgtcttttccatcctgctgccgcagctgaaatccaccgtcctgttctgcgccatcgttgccatctccaactactttttgatgttccgcgacatctacgccctgtatggtgacaacccgcccagccgactgtatatgctgcagcatttcatgaaccgcaatttctatcagctgaattatcagcggctgagtaccgcggcttttctgacctcgtttgtcatggcagtgctcatcgtcatctggttgtatacacggaggaggcgcgatcatgtggaataaaggtccccgttttgctttccagcggatcgctctgagcctgtttgccatcctctgccttgtgcctgcggtgctccttttcctcaactcctttaccctattcggtcaggtttccctggctcagtacgaggacatcctgctctaccggaaagagttttacctctggttctggaacagcgtgggctacaccgctgccatcctggttatccacctgcccgtcagcatcctggccgcctacggctttacccaatacgagtttcggggcaaaaagcttctgatggggctgtacatcctgttcatgctcatgccctttcaagccaccgtcgtctcccagtacatcacgctggacgccatgaacctgctggacacccgcctggccatcatcctgcccaatgcctacaacaccttcggggcgtttctgctcacccagttcatgcggggcatcccgccggaggtgatcgaggccgcccgggtggagggtgccaacggacggcagatttttttccgcatcattttgcctctctgccgccctgccatcatctccctcgccgttttgcagctgtttacctgctggtccctcatcgatcagcctctgttgttcctgcggggtagcgagctgcacaacctggccctggagctgaccagtacgcaattcgggacatccgcctccgccgccggtgtgatctatgcgatcctgccgctgctcgtctatctgtactgcaaaggctatttgcagcaggggatctcgctggtggatgccccggcaggaggtgtggaatgaaaatgctcccccgtctgatgcggaatttcgtgctggtgatgctggtcctgacctttttctgctggaagctggatgctctgcgcacccctgtggtagagaccgtggccccggtatcgggcagcctgaccgacccggacggcacagaaaaactgtacgactgcatcgttccccggcaggctctgtcctatcaggacaatttctggtatgtctatgtatacgattccacagcggagcaggaattccccagtttcgccaccggcacagccgtccgcaccgtggtgaccatccaggcgcaggagggcaattttgccgccattgacggatatctggcaggtgactcccaggtggtcctttacaccaccaccccgctgcggggcgagcgcgtcgccgtcagggccggaaaggaggggtccgcttgagccattttcggcgtttgcttccgccggcgcttgccgtgcttttgctggcagccgggacgctcctgttccaggcccggctggcccggtgcgtcccagaaaatcgggtggaagtcctgttctcaattccggcctccgaggcgcagagctatctggatgcggccctgcaggatgaaggcagcccgctggaagggctttccgtcctgcgggaggatgaccggtggatcgtgcagggcgcggaacttttcactgcacagcgtctggaaacgttcttaagcggtacgggcctgtcgaccggcgagtatcaggtgctggattacagctgggcgcagagtaccacagccaccgccacgcaggtgtggcagacggttgccgcattttgcctgcttgtcttgctgggacactttgccgcccggcttgtcctgcgggagtggcggcatatgcgtgcctgcctgcggaccatgtatccggcagagtttttgcaggaaaacagtgagcgtctgctgaagcggctgatcctgtttgtcccgctgtttctggcggctgctctgctgctccgctggctgtggaatgtcagttactttctgcccgcgggattcctgccggacggcagtctgtttgatgggcagcactattcccagtgggctgccgccgccttcccgcaagagatcctttccccctatgccgcgcagcttcgggacaccctctcccttgcctgcctgggggcttgcgtactttcgattctttggctccttttgaccatccttgtcctccgcctggacggcaaaaaagcggaggtatcgccgccaaatggaagagtcaaaccgcaaggatggtcggcgcggggcatggcacactcctctgtcattgagcgaggtgaattgcatgaaagagaacaataaaaaaagctgccggacccttttgctgcttctggtactgctgatctgcatcgcgggagcggtcgcattcttttggctgagcggcaggcagacggcagacggaaccaacgccacagcggaatccgcttcaccgtcgctgtccgaaagcgccccgatctctcagaccatcgaccccgcccggcagaggtatcagttctcactgaccgacagtcaggagcaggaaattcaggaagactatagtttctatcaaaaatatttctggctgggtgaccagttggtgcgcctggcccccagcgagaaggcagatgtctatctcgacctctgcgacgcggcctccgacgatgtggtgcaaagcatcccctatgctgaggtttcatcgattctggaagatgaggatgcgattctttcgggtatctcgctggatgcggacggtacgctccggatgctgacctgcaacggagattccgcctataccctgtggcaatgcactcccgacggcgcctctccggtcaccgtcgggacctgccagtttttgtatcccatgtgcgacgattttgccgtctgggaccagtatgtggtgaccatcggcgccagtgacagtcagttcggctcccggctgtgcatctacaatctgtcggacggcagcacgcaaaccgtggacgatgtggtgtgcttctgcctggatgaatcaggacgcctgtattgcgccaaccaacagtccggaactctgatttgtcaggacctgaccaccggaagtacgctctggcagcaaaaagtatcctgccggcagctgttttaccatccccagtacggtctgtttgcctgcgcctacagaaccggccaaatccaatgttatgaccccgaaaccggcaaagtccggtacgagcttttcgcctggaacgaggacacctcgctggactatgatgaaaacaggatcaaccgggcaaattttgccgtggatgaccagtatcgggtttatttcagtgtgatcacgacagaaagttacgagccgccaatcacctatacgcagtaccgctggacgttttcgccctacctgacggaggatgcagcgacagccttgaccatcactgcgccttatcaggccagctcgctggactctaccatccggatgttccaaaagctgcacccggagatcgaaatcatctgggataccgcctacgattccgaagacgccttccgtacccatgtggaccaatatgccgaacagctcagcctgcggctgatgacaggcgatgtgggggacattatcctgctgtccggatacggactggacacttctgccatactgggaactgatgtcctgctgggcctggatgaatatttaagcgattgcagcgccctttctgatttgaatacggacattcttgatcctctgcgggattcttccggcaccctgcgcgccgtaccgctggcattgaacccgccctatctgatttataataagacgttggcagattccctcggcctggattgggacccgcagcagctgacctggtctgaaattttggaccagggcgcacagtggcatcaggaggggcaggacttcaccctgttcggcgtgatgaattcctcctctgtggataccctggtttcggatatgatcctggtcaatctggatgccttccagagcaccgcgtccgcagagcagcttgcaccgctgtttgaaaccacaaaagccttgatcggcgacggccaaaacttttaccggattccggatgcccaattctggtggtcccccggcttttgggataacacactgtttacccccggcataagcggcgcagattatgagaatcttttctataatctctcctgcgccgagcgggacaacgatgtggaactggagatcatccccatccccaaaggcgaggatggcagcttccgccagtcctatgccgattgctttggtatttcttcccgctcggagcacccggatcaggcctgggaatttttgcagtttacactgagtgcagacggctttgttggggatatttacgacagtgagtatgcgctctggaaccgtgccgcggatgcgcagcggtatgcggccgtagaagaccacggcattcccctggagccgggaaaataccaggagtaccgcgccctgtgtgatctgcccgcctcccgattttcggaacccgccggctggatcgacgcggtatgggacccgatcttgagttatctgaaagaccagaaaacgcttcccgacgcgatggataccgccgccgaaaactggacccgccaggctgcagaataaagaaatctgttacagccgggaatgatggcgaaccgccccaaagggcgttgagtaagtattcggcggaaagaattggccctactttgacgcggcttcttttatctgcctgtccttttctgcttatttcccaggagagaattctccggccgggtcctctcattttgctatattccaacaccaagggggctggtaaaaaccagcccccttggtgtgatgtatggaaaagaagcaaaagcttcaaggtaatggtatggtcaggcagatgcccgccggatgtattttccccggcggacactgccgctgcgttttacaaaatcttgtcaggactgtccgtgctcttccttcttgcggggaaccatatccatgaccagcagtacaaccgagagtacgctgagtaccgcaagagcaatggtcgccacattcagcgtcatctgccaccaaggcgtgacagatacgatctgggtgtcggcgctgaagccgtccatgccacgggagtgcagcacggtgtacaggattcgatgagcggattcgcgcatggcgcgggcgacagccgcattgggcgtttcgccgtccggaccgtaagctgcgaattcaaagcccaggtcaccggtggtggaattagtcccgccagtgcccgtagtgccggggaagttatcgggaatatcgttgcccgccagcacctcatggggcttgctcatgtagtcgccctcgtacatatcggtcacggcaaagccttccatgccggcctctccgcggagccagtcggtcagcagttcatcgcaggcaccggaccacaccgcgccgatacggttgaatgcggtcatcacgcacttggcatcggcgttgacgataggcagctcgaaggcgcgcagatagatctcacgcatggcctgctcgttgcaccaggtccccaggccctgtctctgcgtttcctgctcgttcagggcgaaatgcttgttgtagacatacacgcccttggactggataccaatggtctcggcggtatcgatcaggccggtcaggatgccgtcctcagagtagtactcaaatacacggccggcataaggagtacggtggatattcaggccgctgccataaatgccggcgtaaccggcccacatggcgtcctcaccgatcagttcgccgacttcctgcaccagctggtcattgaaggttgcggcaatgatgccattgcagggatagcaggtaccggtcagtgccttgtccgggtcattggtctggtttgcatagccgttggtaccggccgagtatgcctgtgtcacaccggaaggtccgttgtgatccagggtctccggtttgccgatggactccagcgacaccgtcatgcgcaggccgaccgcacacaggcgggacagttcctcgtaagtcagctgatccagcaggctttcccacatgggatcgtcgtaggcgatgggctcgccgttttcgtcctgcagcagattgatcagctgataagatgtctccgtggaccccataacaggccagttgtcatcattttccggcaggtccgccgcatccaggatggtatcctgatacatctggtccgtcatcgccagctgaacatagttgtcgtttgcgccgtccgcgtcggcatcgccccacagcatcagggtgccttcccagttattgcgggacagatagctgacactgttgtcgcccttgccttcgtagcggttgatatccgcagaggcaaacaggctggtcacatcgttgccggtgccgtaagccttggcataggtcgtggcgtcaaatgtatagtcggccttgtagaccatggcggggttgccctcggcggtcattccgttcgcggtggtgtagcccttggccgccagaatgttgttgatggcggcatggctgttgtccgcggcagtcagatagtagctgccctcgtccagaatatacacgccggtccccagcgcatcgtagctggtcaggaaatactccggcacactgatggtcacggtctcactggcgccgggctccagcatctgggtcttggcgtagcccaccagttccaccgacgccttttcgatctggttctggcggtcgtagtcggtatagggtttctgtgcatagacctgaacggtctttttgcctgcggcactgccggtgttcgttacagtgacggacaccgtatactcggtatccatgccttcaccggatttttccacctgcatgccgctcatctcaaaggtggtatagctcaggccatagccgaagggataggccaccacgtcgttgtaaacatagttgccgacgccggcgcttcccatcaccgcatcctcatagcgggtctccgtgtagcggtaacccacatagatgccctcctgatagacgacatagctggtaaatttggcagggctggaagcatagctgtaatcccctgcattggtataggtatagacaccgaagttcgccatggcggggtccagcaggttgttggtccaccaggtatccggcagagagccggagggattgaccgcaccggtgaggatatcgcccaccgcgtacaggccggtctgtcccacagaaccgatccacagcgccgcgtcaatgccgtaggcctcgtcgttgaggaatgccgcattgaccgggttggcgctgttgatgatgaccacgatgccgctgatcttgccttcatccttcatggctttcaggccttccaggatgcccagctcgttgcggttcagcatcaggtaatcggagttgtcggccacgtccgcccccagggggttggcgccgccgtccatgtggccggtactcttgaggtcgttggcctcaccgcccacgcggcccaccacaaagacagcgacctcgccgttgccaaaggtgttggccacatcgctctcggcgatgttgttccagcgtgcttcgttgatctcctcgccgctgctggagaactcacggccgtattcttcctccttataccagtccatcagggcggcattggtaacgttcagaccgctctcggtcagagcatccacataagtgggtgcgtccgaggtattcaccgcgccggagccggtaccgccgtacacgggggaagctgccgtcgcgccgaacagcgaaacgtccttgccctgcagcggcagcacaccgttgtttttcagcaggacggcgccttcggcttccacttcctccgccttggccaggccggcctctttcagttcagcgacggagttgtactgggattcataatagcgtacatactcgccgtcctcctgcccaatgatctgggtggtggaggtccccaggaagctgttgatctgcccggcaaactgcccggcgatggttccgccaaaatagaccacgaccagcaggccgatggacacattggcaaaaattttcttccatagtctttttgaagatttcatggaagttcctcctaatctgcgattttatgccatcaggcgggcttgtatttttttgcgtacaggccgatctctgccaccacaagagtgactgcgatcagtgccgcacaaacgatcagctgcatgatctgcgggaaaggttcaatgccatagatggtatccgagaccggccaaatggcgatcttgacaaacagcatcagcgaaatgccgctgcccaggcagagtactgccggggcaaatcctgccgtcttttcccctgccagcagcaacaccgcgccgatcacgccgacggccgccagaatgacacagatgcgaatatcaaacacttgctccttgtattcgatgcccggaaatacgatcccgtagcagatcgcccccgctatggcaagcacgcaggaaaagagcgtggcataaaacccgaatgattttttgctcgtcttcataaaaaagagctcctttcggcaaccggccaggagaaaactcctggccggttggggaatggccgattgaaaaagggaggttcagttcaaatcaagcggccttatcgaaaatcaggcagtaggtccagtcaccttcggtgccggggcgttccagatgctcctcgctgtagcccagcagcagctgaccctggttgttcaggccaatgatcagggaacgctcggtggtgtcgatgtcggcggaaacgccggcgatctgatccaggaacagaccgtaggcatccacatcctggaagcgcatggtggcagcgcccggctgcttataccagttgccttcctcgacaacttcgccctgcgggaagtcggaccaggcagtggaaccacggtagccgtcgataccgtccgcggaaagcgtctgattgacagcatccaggccgaacgtcatggttccgctcaggttgtaaacacggttatgaatgtaggcagcctcgtccaccagctcagaggggtcctcggtcagggtgatctccaggctcatggcgtcggcagttgcgtcggtcgtcgcaccgtcggcatagacctgtaccagattccaggtgccggccatatcctccacgttgctgccatggaagagggcggtgggctccgcattgggatcgggctcagcggcaggggtttcctctgcgggagtttcttccgcggcggagtcctcagccggagtttcctcggaggaggaagtctcggtctgagccgagctggaggtggaggcatcggcggaatccccgctgttgcaagccaccagggcaagcatcatacttcctgccaaaagcaggctgagcagctttttcataagttattctcctttgtgtgtgggggaaagtctcacgtacaagccacgcagggacaagtcccccctatcttttgaggggacctgtcccacgcagcttgtggagagactacgaaataacatgaactgtcagttcatattaaacaaagagggtaaattcccgcgcgatcaggcgctgtagctcaggccaaaaccggagacgtacatattgccgtccgcgtccttgtaggcgtagctgccggagggagaagccgccagcacatcagcatccatgtactgatccttgacatagccgggcacgtcgttgggggagacgcagacatcccagacctcgccgttcagatcggtctcgaccagggcaatgacggaagcatcagccaccatggtcataggcagctttccggtgggattgaatgcgccggaaacgacctgcacaacagactcatcggtgttcttgaaagtgcccagcagtgcgtcgcagtagggctccatgttggtcaggatccaggcgttggaagcgttgatctcaccaatgaccttgccgccgttggcatggacagcatccgcgatttccttgaacttgtccataccgtaaacggtggtgaccagagtggtatcttcagtgcgcttggcgttgtcgtcgtagacgggagtctcgacatcctcggccagatccaggatagcaagttcgctggagccggtgcccacaatggtgggatccacgcggaggtaagccacgtcggcctcgttgtaatcatcaacaacagtgtagcctgcagcctccagagcctcggtgagggcagtcgcatcgtagtcgtcattctggttgaagccctggacgtagatgctgacgccagtgtcgctcagaggcagagtggaattggagttcttcatcaggacgacggagtccaggttgatctgctcagcgatagcctcgaccttcggagtgacctcgttgacagtagcaacgctttcttccatgtcgcggtaggggttatccaggttgccgctctgcacctgaggcagcaggcggtgatacgcagcgtcctccagctcttcacgggtcacatcgccgttagcgagagcctcgtccagcagttcggaaggatcgtcggcggtagtgtcattgttcgtcagcatatcacgggtggaaccaccctggaagttgataacacctgcgtcgcagccagccttgatatactggaccatacgctcgtagttgctcagatcctcaacgccctgctgcgcatccatcgacagagagtcggagttgatcaggccgtcaaagcccaggatgtcgcggagcagggtctgcaggatatcctcgttgaaagcgttgccgcggccaccgaagcggatgtcgtaagtctgaccgttgtaggtaatggactgcggagcaatacggtcgtcaatgatgggctgagagtaaccgggcatgatgccggcagcaccggcctcaatggcagcgatgaacggcttcagctggtaatttgccagagagttctcggtagagtagatgcggtaacgaccggtctgaccgtggctttcgaagccgttgtaggcagcgccgtcaccggggaagtgcttgatggtgaccaggacgctgccttccaccataccctgatcgccgttctggtaacccttgaccaggttggcagcgatctcagagctcatatcctcgcgctcgccgtaggtgctgctgttacgggaccagcgaggatcggtagccaggtcgacctgggggccgtacaagccgtcaacgcccttggcccacatgacctcacggtcgtactgagcatcttccagcacgatatcggcattgccggtacccagagctgcagcggcaacgccctcagagttgggcaggccatgggagatggggttggtaaacatgaagaagggcaccgccacctcgccgttggcgatggcgtcgtattcgctgtactgttccagtccgttgttgaaccagactgcgacctcagtctcagggttggaacgcagaacaaaagtacgggacttggaggtattcagccagtcaatattagtggcattggggtcttcatcgctgttgccgtagccgcccgttgcggtgtaaagcaggttccagacaggagcaccgttctcatccaccacatcggcggtcgttgtgctcttggggctgtaagccataacgttgaccacctggtgggtcagctgggtatcggtgagggcggcggccattgccttggcgcgggtctcggcgtccaagcgccaatcctcaaagtcgtcaagttcctggtcattgtccagatcacggaagtactggccatcctctgcgatgacgcccagcagggtgacgccaatggtagggccattctcgttctcatagaacacggggtccaggatctgggcagtcagcgcgtctgcgtcggctgcggtgtagggagcggcaatgtagccattttcgacggcagcgttctcacccgtctggctggtggagctgctaccggaggcaggactgctgcatccggcgatcatggtcaggctaagcccggaagccacgacctttaccagattcttcttttttctcatggtcattctccttttcttagtcttgattacttgaaaaccctgtgccgccaaatgctacccgctcccgcaataatcgcaaagcagccttgcagaaggcagccttgcaattcttgctgcaaatccgcggttgcaaagttctcccagacgttatctgcaaacgctttttttgcataacagcgcgtattcagttggctttccaggttcaatggccaaatagccagtaatccaaccttgaaatgtccatccctcttgcggccttcccaatccacagaattcggattctgtggatttttgcaacagcacccacaaaaaaagcgcgcttcaaaagccagccggtgccattttctgcgataaaatcccaaaaaacagcatagtagccccctccctaccggcttacgaaatcagtttcgatacctgtggggtctctttacgtcacccaaaagcgcaattttcacaagccccaaagcaatttatgcattgttctttgctacggatgatggtataataaacaaaaaaatacgaccaataactggataatatagcgcggcttccacagaatccgaattctgtggaagccgcttttttatatcaccagtcccagacggtcgatcttctgccgcagttcctgttcagtctccatgatgtaaatgcgcgtcgtgtcgatactgctgtggcccaaaacgtccgcaagccgcgccacatctttttcctgccggtaaaatgtcacggcaaacagtttgcgcagattatgcgggaacaccttgcttgccgcaacgcccgcccggccgcaaagttttttcatctgcgcccagatatagctgcggtccaacggtttaccgtttttggtacaaaacaccgtcccgctgtggatcccctgcctccggcaataggccgccagctgcttgcgcagtttggccggcagcagaatggtacgcgtcttgcctttgcaggtaatgtccaccccaccccgtttgaccgcctccactgtaaaaaattgcagttccgacacacgaatccccgtcccgcagatggttttcagaaccagatacaacctggggcggcatttggcagcggtcagcagcttcaaatactccgctttggtcagcgcccgctcctgagaccggtaggtcctgcgctgccgcctgagcgccttgacgcagcagctctgccaccccagaaatttcagcagtccgtttactccgcacagtttcgcgttgactgtgctgacctgacacccccgctgaaccaactgctgtttgtaagccaataccatctccttggtcaccggccgtcccgctgccgtgcgagagaactcccgtatgtcatgcatatacttttccaccgttgcccggcctttctccccgtcgaccagatatctccgaaagtcagccagcatccgtgccgtcagtatctgttcccttttgtccgaaccttcccacttttctccgccttgtccaaaggtcattcatagtcctccccttcaaaaaaatccacgcacaaacgttgcaatccagactcacaacgccaattataccaaaacttgcagcgaagcgtatccccggaagcctctcgccccgatgcatcttttcttgtactgtccggcagtgaatcccagaatagttctccccaggccgcgccccgccaaagggcagccgttgccaaagcgcaagtacagcgaacataaagtattttttatttccttgctcccagttcatccgaggtctattcggaacaaaaaagaacgggttcccgttcatacaggaacccgctctttcaaaaaggggagaacatatgcactttctctggtgacagagacgactccgtttatgttagaagttctctctttttccaggcaccgctcacaaaataaacaatacaaatgataccgggaatcagtcgggaaaatccggttccccaccagaaccctgccacgcccatgtcgaacccatagacgaggatcaacgcaagaccaactttgcacacgacgccgtccagaattccaatcacaaaattcagcgaagcaaaaccggagccgatgaccattgcctgaaacgagctcgtcacggcagacaggatcaaatgaacggcaaggatctcgagataaattacccccatgtccagcacggcctgatcggtagtgaagataccgaacacaaaacgcgggaacgtgagtacgatagccaccatggccagcgcaatgaccatacagctgtaaaacgaatacagaatggttttcgatgcccgctccggcttttttgcgccaaggttctgcgcaaccatcgcggaagccgcctgcgaatagctggagctgtacacttcgaggaatttttgcagcttgttgccaacgctgtttgtagcagactctgtaaggccgtatgcgttgacgctggcattgacgtaaaacatcgacgcccggacgagaatagaacgcagcgcctgcggcacacccagcgaaagaatcactcgtgcctgttctttgtgaatgatgaagaacgaaggcttgagctcaaaatcgaaccgctctttcctttgatacatgtagataaaagccgcaaagaacgccgcgccctgcgcaatggtcgtagcgatcgcggttcctgccgcctccatatgcagcgggccgacaaaaatcacgtccagaacaatgttgaccaccgccgaaataatgatgaacagcatcgggcgtttcgattcgcccattccccgcagtacacccgtgatcgcattgtatccgaaaataaacggaaaaccaatggctgtcagaatcatataattgtccgcctgtgtaaacgcctcctgcgggcaattcaaaagattgagcagctgcacacgcaggagaatggtaagcaccgcaaaaacgacggacccgagcatcataatgctgatgagcgtgccaatggctttcttcagtttttcctccaaacgcgcgccgatcagctggccgatataaatctgccctgccgcgccgaacgctgttgccaccggggtcagaagatctgaaatttctccgcctgtagagactccgaccgttcctgtactccccatgaatattccgatgaccatcaggtccaccatagaatacagctgctgtatgaggttggctaaaataattggccccacaaagaacagcaagcctctaaaaacagatccctgcgtcaggtcggtgcctacacgttttgcctgcactgccatatcatcactcaccttttcatctgattttcctcttcattgttgccttgtccagtttgaaaccctcccgattctgtgcaggcaaccaccccaaatcctttcacacatccatacactgtctccatcccccatcgccgatggcgcactcctcttcggaagaccatttttgtcgaattgcagccagatattgccccatcctcgccgaagggatggacgggcaatcccggtctgacacggctgcagattatccatggatgggccgcagctgttatctcatggctcctccgttattcgttaatttcatagccgatcacagaaaagccacggatatatttgaagttgcgcactttcttatcatcccgcattttcccgtacgtaatgtgctggtaatcgcactgttccggcgccgcgagaatcgcattcacggtgtccagcacatcctgcatcaggtggttctccaaatttatcatgaaatgctgcggaaaaatgtagtcatactcgtccatgcggtcaacaagatactgaacgcggtcgcgatagaacggcagcagcgtgcactctgaatgcggccctttcgaacgcggtttcccgatggtaccgcagccagacacatcagagcaaatattatccccgctgaacaggatgcgctcgtgcttatccaaataggctgcatgaccggctgcatggcctccggtgaagatcaactccacttcatagccatcacccaagtcccatgtataaccatcgggaactcccacgatctcatagggacggtagtgcggcaggtcggcgcggtcaaactggagccagatattctctccccagcagtcaaacagataatcccacatatgttcatgctggtttgtcaggtaaggaaccagatattcatggcaatatactcgatcaaatcggcaattcccgtatgcatggtcgaaatgatcatgggtatttacaacaataacctctttcccgccggtaagtttgtccaccaaagctttcagatttcccaagccatatccggtgtcaataagcatggctttttgcggcccaatgatgagatgcatccagacatcccccataccgtcgcagttcgggtgcaataaactgtaaaggttctcacgaaactgataaacttcgatatagggatcttcctcgtagatttttcgggttttgtcgtgctcccgaagttccttcatgtacgcccagctgatttggttctgcggcgcttcccagcgcaagcgttttgccttggagccgccttcaatctgccacatcttgcctttcatagtggtcctccttccgatctatcgagatgttatataacgaatacattgaaaaccaaaaagcaaaattgatattttctttttacagtgataaactatgactattctagaaaatggagagagctgtatatggatcttgcttcgtttcaatactttctttcgattgcagaacatatgagcttttcagaggccgccgaagaaaaccacgtgtcgcaatcttccttgtccaaagcgatcctgcgccttgagcaggagcttaacgtcaaattattcgataggaatcatcacccaatcaacctaacaaacgccggatgctgtctacgtgactttctgctggaagtaaaaccgctttacaaaaaaacgctccgtgaactggaccaatacagaattcaccacacaatacgttgctatttagtgccccggctttatgcattaaagaatgcctcattggcttttttagcatcaaaccgtgacatagagctcacgttatccactggttcgaattttgccacggctatccacgagatgatggatggtgattttgatatcggcgtcatgcaccagccatttgagcttccggaaggccttcgcatgactgttctatacaatgaccagccttatgtggtgttgcctagaaatcatccgctggcagagaaaagcatactttctttgcatgaactggatggatatacgtttgaggaaagttatttttcttccacgttggtacatgaactctccgaccgatttggctttaagccagagcgcatcactgtgcatcaaagcgttgccggcagccgggaggaatctcttgtccgaatttctcacggagataggatcggtattttttgcggtcgtgacattacgatgtataacattcaatccatcaatctggtggcacgcccattaaaagaagtcccggctcttcccctggtattggtggagcggccagaacacaccgatactgagtggcaccagcgtttctgcgctttcctgaaagaaaaacaggaaagctatgccgcaccgattttgaatttagaggcacaagaatgaccaacatttgctgagattactccaaagaaacgccttccgaaggcatctccttggagtagcgccaatccgtacaggataacgttctgctggcggcagcgtggtcgggttaggtagtaaactgattcgaggtggacaccggcaacccgccccggattgtccgtgttccaaagatggcatcgtatatgaatatcattatagagaaaaaggtctttagttcaattcgtatttttcatggggattattccggcaaggaataatcctttttttctgcaacagattgacatagaaaaggcgcttgttttataatgcagaaaaaacctgactgcgtatcgtaaaatagagaggatgtgtttgctttgcaatccaaattatctcagcttcaaacacttcagcaattgctgcgcagtttccggaactacagtgtggtcggagccgctttggttttttcctatgcaattttgcatcatggcttttcttccgcgagcatttcagatacagtattgatctggggagatgcctttacaatcagtggcgtgtttttgtttttgatcgtgggggcccttgccctctatcgaaaaggttatttggactgggttgcttatgggttgtatctttcgagatttttgttactccacaggcgcaatgcagaatacgtcaacttttatgattacaaaaaaatgcgaaaccaacctcatacgatgtattggccgggattattaaccgccacgttttttttccttttgggtctgggattaagcatgctgttttttttaatttaaaagcgtcagagtctttctgcgcgcgtccaccttcccctggaataaagacaaaatttttatagtcatattcttcaacttgtgatgaaaagggaatggcacctcaaaagaggtgccattcctttttttgttgcataaaaaatcgcaatcaaagattgcgaacaattggtgacaattccaaggtattacaaagatttgcccaaatatgcatcttcccctttgtggaaatctacaatcccaaaagacattattccattttggaataatcacggtgtataaaaatgaattgaattttcgcaacacgattcgcataattgtaatcgcagacaggttttttaacaaaagggcaaaaaaatcataaaatatgacgatttttcccaagaaacagactgcgcattgcgcgtggttgatatatgaaagtaaggaccaaaaggaaggagcaaaacacaatgaagaaaaaacataccgatggcttgctgaaagcggcagggatggccttggctgttgggtttgcggtgagcgttctgaccggttgctcgcaaagcagcggaaccgcacagcaagacggcacgcctgaagcctctacaagcggcaaagaccttacggtggtcatcagcagcgatgttggcgatctttctccgtttggtggagacagtggtggccggcaccatacttaccgtatgctttatgattgcctttgtgccagcaccggtctgggacaagcggtggacgaactgcaggggcagatggccaaaaccgttacggtcgtggatgactataccgtagacgtagaaatttatgattacattcacgacgtactgggaaatgacatcactgccagcgatgtggttttcagctacaataccgcaattgctagtggcacaatggaaaaactcaatggctatctgggcagtattgaacagaccggagattacagtgtgcgcatcacgctttcttccccttcgaaaggcgcaatggaatggtgcttgaccaccgttcctatcatcagtcaaagttggtatgaatccgcctcggatgcagacaaaacatccaatccggctacgacgggagcctacaagctggttgaaaccgtagcaagcagccatacctctctggaaaaagatgaaaattactggcagacagatgaatcgcttcgtacatattatgatgcacagacattcgactccatcactatgaatgtcatcacggaatccgcgatgcggactattgcacttcagaatggcgaagcagaccttgtgcaaaacgtttctgccaatgagatttcttctttcctgaatgaggatggaacgaatgttgatggttggaatgttttccctgacgagaatggccgcgtatatgtcctgatgttcaataacgacaacagcgtattcgctgacaataaggccttgcgtcaggctgtactgtatggcattgatttcgaggctgtccgaatcggttacggtaatactgcaaccaatggttctgtttgctccaccttcggtccggatgtcgcaggcgacttcaatgaggaatggaaaaacgaggattactacggctacgacctggaaaaggcaaaagaactgatggcagaagccgggtatcctgacggcggctttacggtccgtctgctttatcagaacagcaccgcggccaccgcaggcctgaccgtcctgcaggcaaatctggctgacctggggattacggttgaacttaccccggcagatcaggcgctgtttaacgcttacaaatatgacgatacgcagtgggatctcattgttgataccaagggtgtggatttcattactgccggctgggaaaatgtttttgattctcgcgcctttgaaaacggcagtgcctgctttactcatgatgacaccttgcaggaattgctgatggccgcaagcaacgttgagacctccagcccggagacgatcgacgcattccatgattatctgaaggagcaggcctatggcgtggggatgttctggaactacgtctactatgtagctcaggatggaattaccggttttacccaggatggattcggtaatctgactcccaatactgtttctgtggcagaggattacgtttcggttgtgaaataagcagttgttcaacaagaacttcgagaatgtaaaacgcggatggtgggacaaagcctaggctttgtcccacatatcctctcgcttgtcaaatcaaaagaggaatcgcaaatgggtaaatatattttgaaacgagtattgctgatgattccaatccttattggcgtagcaatcatgattttcactctgatgtattttgttcccggagatccggcagaaatcattttaggtaatgccgcaaccgaagctcaggtggaagctgttcgtgaacaactgggtcttaaccagccatacattgttcgtctgggctcctttttaggacagctgtttttccatggcagttttggcaactcgtatatttatggtacggatgtgggcacggagctcctcgcccgttttcccaagacgcttgtaatcgcagcgttcagcatacttttgtccgcgttaatcggtgttcctctgggaatccgcgccgcaacacatgccaatcaggctgaagatcgaatttcgatgtttgtatccatgataggcgtttcaatgcccaatttctggcttgccctgatgctggtcctgctgttttccttgacattgggctggctgccttccagcggtgcgaaaagttgggagtattatattttgcctgttcttgccaacgcgcttggcggaattgcgggaattgcccgccttaccagatccagtatgttggaagttatccgtgcggattatgtcactacggcacgagcaaaaggtgtgtctgagcacaatgttatttacaaacacgctttaccgaacgccctcatccccattattacaatttgcggaggacgctttggcggacagctgggcggtacgatggtcatcgaaaccattttttccattcccggcattggagcttatctaatcaacagtatcaataaccgagattataatgccgtacagggcagtgttctgtacattgcatttacgttcagtgttgttatgcttttggtcgatctcatttacgcctacgttgatccgcgtatcaaggcacagtacgaaagccaaagcaaaaagagagtcaaaaaatcaaaagaggtgaatgcaggtgcctgattttgcaacgaacgcggaaaaacgcaagaactccagcagtaagaaaaaagtaaagaaaatggcacgcacaggttccgcgctgtatgtgtggcaaaaaatctgtcagaatccattgtcccttgccggtgtaattgcaatcggagcattggtcgttctctcactgatttcgccctatattatgaaatacgactatgccgccattgacatggcaaatgcctgcgccacgccaagcgctgagcactggtttggctgtgatgaactgggacgggacatcctgtctcgtattttgtacggagcgcgatataccttgagcgtaggtttcctgtcggttgcgatctctgcaacactcggcatagcgctcggtgcaatcgccggatatttcggcggcgtgctggatcagtgcatcatgcgtttcctggatattatggctgcatttcctcagttgctgctggcaatcgccatttctgcagttcttggcaccggattcgacaaatgtatttacgcactaggaatctccggcatcccgcattttgccagaatgatgcgcgccaatatcctgacaatacgcggccaggaattcgtcgaggcagccacttccatcaattgtactaaggctcggatcattctcaagcacgtcattcccaatgccattgcacccttgatcgttgaaatttccatgtccattgccagtgcagggttgtcagcatcttctttgagttttatcggtctgggtgtccagccgcctgcaccggaatggggtgccatgctggcctctgcacgcaattacatccggttatctccacacatgattatgttccccggccttttcattatgataagcgtgctgagcttcaaccttattggtgataccatccgtgatgctttggatcccaagctgaaagattaagaaaggcaggaagaccatggaaacttctacaaaacaggcacggcattttttatctgtgcgggatttggtcgtggaatatcggtcagaaggaaagacagtacaagccgttaacggcgtatcatttgatttagacaaaggaaccacgctcggcctggtaggcgaaaccggagcgggcaaaacttcaattgccaaggcaattttacggattttgcccgatcattctacacagcgtgcagatggaatcgtggcttttgacggcaaggacattatgggaatctccgagcacgaaatgcaaaaaatccgcggtcgaaaaatctcaatgatttttcaggatcccatgacagctctgaatcctgtaaagaccgtggccgaccagattgccgaggtcgtcaagcttcataacaatgtaaccaaaagcagcgccttggagcgcgccaaagaaatgttggaaatggtaggcatctcagccgaccgtgcaggagaatatccgcatcagttttctgggggcatgaaacagcgcgtggtaatcgcaatggcactggcgtgtgacccggaactgctaatcgccgatgaaccgactacagctttggatgtcactatccaagcccaggttctggatatgatcaatagcctgaaaaaaaagctgaatacttctatgatcatgatcacacatgatctgggggttgttgcagagacttgtgatactgtggccgttgtgtatgccggtcaggtcattgagtttggcactaaagaggacatctttgaccgtccgtctcatccttatacagtgggccttttccgcgcattgcctgacatgaacaaggacgcaaggcgtttggcccctatcgaaggattgccgcctgatcctactgacttgccttccggatgcagtttttcccctcgctgtccctatgcaacggctgaatgccgacgctcaccaatttcgctgcaggaactgacgccggggcatctttgccgctgcattaaagtgtcaacaacccaggaggaataactatggcagcactgcttgaagttaaacatctcaagaaatacttccccacgaacaaaggtaccgtacatgcggtggatgatgtcaccttcagtctggatgccggtaaaacgatgggcgtcgtcggagaatccggatgcggcaagtccacccttggccgcaccatcattcatctgcagagtcccaccgatgggcaggtcatctttgacggccaggacgttacatatgtcaaagggaaaaatttgaaaaagttacgggaaaatatgcagatcattttccaggatccatactcttccctgaatccccgcatgtctgtgcatgacacgatagcagaaccgctgattctatccggaaaatataaaggagcagaacttgaaaaagaagccaaccggttaatggacatggttggtattgaatcccgactgcgtaatgcatacccccatgaaatggatggcgggcggcggcagcgtgtcggcatcggccgggcgttggcattgaacccgaaatttatcgtatgcgatgagcccgtttctgccctggatgtatccattcaggcacaggtcctgaatctattgatggatcttcaggaagaatacaaactgacatatatgtttgtcacccatgatctatctgtggtgcgtcatatttcagacaatatctgtgtgatgtatttgggacaactggtggaaacctgtccgacagaggaactgttctgccactcgctgcatccctactcaaaagccctgttgtctgcgattccgtctaccgatatccaccacaaaacccaacggatcattattaaaggagaaatcgtttcccctattgatccccaaccgggctgtcggtttgcaacgcgctgtccatatgcctgtgaacgctgtcaccagccgcaggcattgaacgaagtccggccaggccattttgttgcctgctgccgtgtgcatgaactaaacaatttgaatgagtcagaataaattcatcaatatgatcaaaaggaggggttttacatgactggctgtatgtggccgatccaaaccaaaaacaaggccaaaaggctgaaatggggtccaaaacagaaccagatcagctgggcatacatgaagcagctgcgtgaaaaagataaaacgcagaaaatatatgactgtgatccctacgttgaagtttaccagttcggcaacaacttttacggcctgttttccaataactgtgatggaatgggcgacgtatggatgtatctaatcgttggcccggaaaaggcaatgctcatcgatacagcctttggcctgggtgacactaaggccctggtagatgaactgaccaacggaatgcctcttattgtcgtcaatacgcattccggaccggatcattgcctaggcaatgtgcgctttgacagggtttactgccatgaatactgtgaatggagcattcgcaacaaatgtaaaaagggcgcctgggattacctttttgatgaaaacggcaacaatatctggttggattttgatcgagcggatttgccgcaataccgcgagtatgagttgattgccgtgcccaatcaccatcgattcgatctcggtggcggctatgaagttgaactggtgtggattcccggtcacgactccgggcatgccatgttccttgaccatggcggtcgacgcctgattgccggggatgccgtatgcagcgatgttatgggctgtggaagcggtggaaatgctcaggatccctaccaccaatactgtaatttggaatcgtaccgggatgagcttgaaaagctgtgcaaccggctggatgaatttgattacattttcccgggtcactttatggtaaatctggaaaacagcctcttgtgtgacattctggcgaccctcaactccattctggatgatccaaattcgtatgattataagcaggaagatgtcagcggaaacggcggcgcaaaaagggtccgactgttcaaacacgttcgaggtttcagcgtgattgcatatacgccggacggtgtttaccggcctcgaaaatgaggaatggaggctagaggcttggctatcgttgcaaacgcagagttaaccgtaatttgcagcaatgttggtggggaattacagtccatccgcgacaatgctacgcaaatagaatatctttggcagggtgaccggcgttactggggaaggcgtgctttgaatcttttcccgtttgtcggaaggatgtatcaacagtcatatctgtttcatggaaaaaaatatccaatgcaactccatggctttttacccaacgcaccgatgaaggaagagcttctcaccccggaacagtgcagatttactctctgtgacaatgaacaaaccctcgattgttatccatttcagttttctttccaaatcacctaccgattgaaaaaacgtaccctgaaaatcgaattcatggcggagaatcgctcgtcgcagacaatgtattgtgcaatgggaggacatcctggcttttccctgcccttggaaaacgggttgcggtttgaagactattctgtatgttttccatcaaactgccagcccaacctggttgagttcagcccgtctgtactttgtaccggagttcgcactccatatccactccaaaacgggcgcttgcctcttcggcacgaactgtttacacaggatgccattgttttcgccgatgccccaagaagcgtatcactcgtttccgacaagggctgccatgggatacaagtagattatccgcaaatgccctacgtgggtttttggcacaaaccacatacacaagccccgtatatttgcatagaaccatggtctgcgctgccagggcgggaaggaattgtggaggatcttgaaactctagcggattacacctcgattgctccgcacgaaagggtttcaaaccagtggtcgattacagtttggtaagattttcatattcaattatcggcaatcaatcgctagtgatcgctggttgccttgataaaatgctccttacggaacaaaacggcatcggccgctttgaggatgattaccaccgccggctcatttcgtgatggtcgattcgctgtgcgaggctgccaccaccgcgcagttccccagctgtgccgccaggccgacctggacgaccagtccgcccggatgaaagaccttatccgcagtcaatggtaacggctctctcacccggtgcccccagcgaaggttcgcctggctgtaattgtttttcccgatgtttcaataacaaaatatgtctttcttgccgtctgtcatttcaccaagcaaccaggccgggccccgttatccggggcccggcctggttgttatttccggcagaaagaatcagccgcagggatggtttccgtactcgtccatgcagtcctgacgggggtctttcatgcacagatgcacggcagaaagcttgaaggtctggggaagtgccagaacgttgggattttcgcccacaaacttcttcttggcatcctccaaggcttcctcaaaggtagcgcgggtcttgaggcccatgctgcgggcgatgcccggctcctcggcacccacgatgtagatggcgctggtattcatctcggcgatgtggccgcagctcatcatggagaaaccgtggaaaggatggaaggcattggtaaagcggtacttgcggatatactcctcattggtggcgtagtactcgcccaggcggttcatatccggcaggatattcatgtggtcatgctggaatgcttcccactcttcccgcagatagggccacagctcatcatggaaatagccgttgcacagggaggagcagatgatgacgcagtgatcgctcatgacgcgcttgaagcgcagcacctgggcggacagagcctgcatcatcatgatggggttggtgcccatgccgtcgccgtagtggaacttctggggcataccaaagaccagcacgtcgtacttcttctccgcccagtggacgtaggtgcgcttgtcggcgatcttccagctctctggcatcatttccttggcgtagccggagaaaatggcgatctgacggctcttggagtcgaggacggcgtcgcagcagaagaagggatggcccatcttctcctccatatgcattccgatctcgttgaacttatggcgcatcaggctgccgccgttgacgggggtaaagtcgtcgcggtgcatcacctcaggcacatggtggctggcaatgctcttccagttggtgatgccggtggcgcaatgcttgtaaccgccggaatagccgccgtaggggttgccctgcacatggccgatgagaataggaatatcacattcaaacaccgtcttgttcatccagacagggtcgccacgcttggtaactcccaggtcgatcatattgtccgggtcctcggagtcatggctggtcatctggtgcgtgtaccagaattcattgaacaattcctcgccaaaaatcgccttatagtcctcgggcttggcacggggatgcaggccgttggaaatgatgaaccgaatgtcctctttcctgacgcccttggcatacagttcgcgcagaatgaacttgatggacagtttgcggtggctggtggcctgctcaccgcccttgacgcggtcgggcacgataaaaaccacctttgcgccggggaacgccagctcgctcaaaggcttcataccaatgggattatgcaggctttccagataggcttcctccagcttgtcctcggggatataatccgggtcgggcaccgtcacgccggggacaaacacatcggtgttgtcgggcagttcggcgctcatcaggccgtggccatattcaaaatccagcttcataacatacctccagatcgtatcggcatcttcatagcgaacaacagacagcctgacggccgcctgttgtccgttttatatcatgctaaaggggatggcgtgtctgcgccggggggtatctcaataccgctgtgcaaaccgctcgtccatcttcttcttggggctcacgccggcgaagtcggcggtggccgggctgaagatggtgccgttcatggtcacgttgacaatgccgggcttgccgcttgccatgaccttttcgatggcgggaacgatctcctcgatcttggtgaccttcacgccaacgccgccccagacttcggccagcttttcataggcgatggtctccggcagctgcaggcactcgggaatgccccactgggccagataatcggggatctgcagggtctgagacatcttgatcatgccccatgcgttgtcattggcaatgacacagaccaccggcatgttctgcttggccatggtctcgaactccatggcgtagaagccgaagctgccgtcaccggtgaaatacaccacgggcttgttgtcggcagcccaggcgcccagggtaaagcctgcgccggtgccgatggtgcccaggttgccgtagcggatgacctggccggggtaacgggcacgggcgatgttcagcatccactgggcggagtcgccgccgtcgcacacaacgtgccagtccggagccttcttttccatatagtcggcgatctcgcctgccaggcggccgggatggatgggcaggatatcggacttgcggccctcaatgaagggagcgtgctcttcctgcatcagcttgcgggcttcatcgacccactcgttgtcgctgcgggcaggatacttcttttcgatgacctggaacagctgcatggcgcaggcgccggcgctggccaccagaccgaggtccgcacgggtgttgaagcccaccttgctcttgtccggatgtacctggatgatcttggcgtcgccgttgaagtaaggtgcgcggccgaacttcaggttgccgtggttggtagcgttcagttccaggatcacgtcggcctcgccgatggcgccttcgcccaggatgaacagctcattcttggtctcatcgccgaacacgccgcgggccgtgctcagaggcactgcataaacggggatcttcagatagttgaccagcttttccacgtactcgccgtacttggtgttgtagcgggcctgttcgccgatgaccacaacaggctttttggcctcagccagcagcttggcagcctcttcgatggcagcgggatcggcaaagacagcctcgtcggtgcggtaattcttggggaagtagaccttctcctcgtcatacagaccgcccgcacggccattcagcaggttggcggggatctcaatgtacacggggccggggttgttgcccagggcatgacggaacgccatggccatgtaatcggggatgcggtcaccctgggtgacgcgcttgcagaaacggcagaaaggcttgagcgccgtcaccgtatcgatgtcctgcagcagttccatatcgcgcatgcgctcatcggcagcgccgccgatgtggatgaccggggaaccggcctgatccgcttccgccatgccggtgagggtgttggaaacaccggggccggcggtggtgatggcaacgccgggtttgccgctggtgcgggcgtaagcgtccgcagcgtacagcgcatcgcactcatggcgcacgtcgatgatcttgatgcccatttccttgcaggcaaacaggatcggcataatgtgaccacccaccagggtgaatacgcattcaacgccttcgtctttcagcattttggcaaccagatgccctccgtctacgtttttcataatgtgtcctcctaaaaatcatgaaatcatattatcttcaagcgccccacggcgcgagatccatcctgaattcttcaaagcatttcatacagataggcttgcagctgttcccgggtgatcggctccaccgccagccccagatggtgatcttccatcgtcaggcgcaaaacctgttccagagatgtttcgtccacaccatactgtgtcaggcggccaatgccgagcttccggttcatctgcatcagccactgcgccaccgcctgtcccgcggtccgggaagggtcttccctttccgggtcaaggcccagcgtcattgccagccggtgcatgcgttccggcatggcgccggcctgactggaaaccacaaaaggcagggcaatggcacaggctgtcccgtggtgcacatgggaaacggcccccagcgcgtgcgcgatggcatgtccgatatgcacgccggaacggttgaacgccatgccggccatggtagaggagatcagaacgttttctattgcctcctcactgccggtccggtaggccagaagcaggttttgtgccagtccggagatcgcgcccagggccgccgcatcggaaacgggattgtgctggcggccggtaaaggcttccactgcatgggacatggcatccatagccgtggcggccatcagatgccgcggcatcccgtccagcatgcccacatccaccaaagccacatcggcagcggcgcgccagtcccagtagctcaccttgagccgggctttggtgtcaaacaccacgccgccgtccgtcacctcactgcctgtcccgcaggtcgtcgggatggcgatgaacggccgggtccgcgtccggcggaacatgtcccgcgcgccgcagtagtccagaatatctccgtcatggtccagcatgatggcgatcgccttgccggcgtccagcacgctgccgccgcctgcggccaccactgcgccgacgcccgcttctttcgcgcaggccacgccctggcggatcacctccgccgggcaatccgacacgcagtcggaaaagaccacggtctccagccccgcccggcccatcacttccgaaagctggtccgccgttccggagcgtaccaggtgcttgccgcagatcagcaggacccggccctgtgcacccaaccggagcagatagtcacccacctgcatccgcgcgtcccgcccgaacacgatgtacggtctggcgctaaactgatatgtcatcgacagccctcctttgttccgcaaggggttggccatttgaggctcactgtttgacaatgctgttcagcatttcgatgtcaaatcccagcttgtccatggtgttgtagaacacccagtgtctgcccgcgttggggccgacgccctctcccatctgactgacggaaatgcccagggactcaaagtgcttgcggacttcttcatgttccggcaccatgaacttgatatggtgcaggcccatttcgcccacgccgtccagataatccgaccagatgttgtccccgctcagcggctgaatgatctcaaactcaatattgccccagttgtagaagcaaaatttcgcggtgaaatcgccgtttttgccgtggtatttccggaccacgtcgggatgatccggcggcgggaaatccgcaatgcggaacccgtccatgcccaggacctccttgaagttagccagtgccttgtccagatcccggacgatcaggccgatctggatgggattgtgaaatgtagcctgcaaatccataatcaagttcctttctgttcaaaccgtgaccttacgctgcggggaagaaaatgccgcccagcaggaagccgcttgccagggtagccagggtgcagaccaggatggtcagcgccgtatagacatacgcctgctttttgctcacccattcgttgccgtacatcatggccgcctgagcggaagcacccggcgtcatcagtgcaagctgcaggcactgtaccaggatgatgcccaggaccatggggttggcgcccacgctcagagccagttccgcaataagaggagtaacgaccacagccagcaccatgttggggacgacctgggtcagcagagttccggcaatagccgcaacgatgataaacatggtgggagtaagaccggtgagtgccggagagagaagtgcgaccagggcatccatgatgccgacttcgggagactgaatggccgcagacattgccatgatggaagcaaacagcacgatgacttcccagggcacgccctcttttgccagctgcgggaagcggaccagcggctcaccgttcacccggatcgcgcagacgatgatgaccaccaggatggcacagcccagcatgccccaggtctgcagcagctgctgcagcggccaggatttcggcagcagggagggcgcgcacatcagcacgaccagcaagatcaggaagaaaccggccagtttctgagagcggggcagttttcccacttcaaagcttttcaggtattcgctgctggcgtttttgattttggaaacgtccgggcgcaaaatgaattttgcagccagcaggtaagcgcccagatccgccatgatcatcaggaaggcgcagactgtataagtaaggaagtcgatctgcgtgccgacgacctgagcgatcatgcccatgacgatggtggggtgcggatagaacaggaacaggtcagcgcccagcgagatggccataacaatgccgatgacgccgatagcggcatatccgtcctttttcttgacgccaaaggagtcgcagatcttgtaaaagacgctccacatgatgatcagcgcgccgtactgggcgccgcaggcggaaatgacaaaggccgagagcatgaccatggccagcagtacccagggccggcccacacagatcttgcgtgtgacgaaccaatgggcaatgctcacattcaggccgctgatggagacgtaggcggcaaagatggacacgaaaaagatgatcagaaccgtgtcattgccaaagccggccttcatgatctccgccacgctgaaaagccccgtggttgccagcgccagcataccgaaaaggctcggccagatgacgtccacacagacccagccatacagcattccgataaagatgcccagcacatccatgcctacatccgtcagaggttgaatggtcggcagcgcgccgaacccaaacatgataaagacgcaaatggcactgttgatgtaatacatcgcattttttgccttgccgtttgctttttgttcctgcattacgattcgctcctttttctgtttttgctattgataatgtccgttttgtccgttcagcctgccagaatgtagatccccgtcaatgccatgaccccgtaggataccttcaggaacatttctttgctgacgcgcttgaaaatgaggttccccaccgcgatccccagcaccattgcggggatcattccgccgcagatgcggaaaaaccgatcggtgtaatacccggccatacaatgattcacgatcaaaagggaattggtaaacacccatatgacgctcagcgttgcccggagtttttccttttccggtattttgtgcatcagactcagaaccagaagcggcccgccggaaacatacaatccatgaatgacgcccgccagaagttccaaaaggatgtttacggcctccggcaatttctttttgggagggaaaaagaaattcaccaaagcaatgccgaaaataaacagtccgtagatccggaacaggatggtctccggcaagctcttttccagcaccatggccaaaagcattccggcgatcagcagcggcagcgcggatctcagttccttcaccgcgatatgccgccgttctttcaccgcaataaaaaggcacatgagcagcgccaggacattcaagatggagaccgccagttcctgtccgaccgtcatgactgcgaacggcatgaccaggacggtgcccgcaaatccggtaaccgtctggattacattggccgcagtgatcagacaaaacagcagtaccaggttttccaccgcgttctcctttctgcaggtcccggggttccgctttccgtgcccattctttcaggcagaaacagacagaacagtcatctcattacgattccggagtcaacgttcaggcattgaccggtgatttccttcgcttcctccgacgcaaggaagagcacggcgttggccatgtcctccgcggtctgggcacggtgcagggcggatttgcctgcggcgatggtatcaatgatctgcttgccgtccgtctgctccgccagcttgccgcccagcgccttgcccaaggtgagggcgccgccggtggaatagatgggggtatacacaaaaccgggattcagcacgttgacattgacgttataaggtcccatttccaccgccagagagcgggccagattcatgaccgcgcttttggatgcggcatagggcgccgtgacggggtttccgccatagccggaaatggacgccgtgatgacgatctttccgcttctctgtgcgcgcatggccggtgcaaaggccttgatgacattgaccgcaccaaagacattgaccccgaagatccgtttccatgtggcatcggaaatgttgttgatgggcgggccgacctcgtccttggaggcgatccccgcattgctgaacaggatatccaccccgccgaagtcctgcaggatctgctctcccgccgcattgacctgattttcgtcgctcacatccatgcggtaaaattcggcgtgaggggaaccgctttcccgaaccagtctcagcgtttcctccgttgcggcggcatcatagtcgcacagcgccacggcggctccggccctggcaaaggcgacggccgtggctctgccgattcccgttgccgccccggagatcacaacggtcttgcccgtgtaatcgtaggcaatgtttcccatggtaaaaaactgctcctttccgcgctgctgcctccggccttctgccgtgttctgccaaccctgacagtttttctttttgtcggtcagccgtgcgtttctctgcttttcttgcctatattctaagtcgttttccacaaggattcatcaccacaacctgcgcgttttggtgtattttttttgcacgtgcctgcgcacatctgcacgtttctcgcgttctgcacagtttctttgtgtatattgttttatttttggctcatttatggtacaatttatttaattcatggaattgcatttccttccgctctccgcgcttgtccgcgggtgatgccgccaattcctgcatcgaaaggaacttcttaccatgtcttacctgaccgaccgcgatttttccaacatcatcgaattcagcgcaaggatcaatcgcaattaccccgactttgccggcgagaccctccgggcgctggatgagttgtttcatttccgtttttcctgttacgtggtcctgaacaaggatatccacaacaccttttttgtccaggatgtcaaaagcaacaccatgtggccggtgttccaggaacagttcaaatcccgctattataaagaggacgggtttcttaccgtcctgcccaagctgcgtttttccatgccggatcagcacgcctttttctgggaggatgtggccggttccagcaagccctcccgggattatctgaccctgctgtccagccacgggatcgcctatgccgccctggtcggcgtcagcccttccatgtatgcccccatgcatgtcatgacggtattcaaaaccgcgaactccggaccgttcaccccctatgagcgggaactgctggagtatatcggcctgactttttccaactccatcaagccgtacaagacctggctgcagacccagcatgttctttccgccaccgaacacctgttcgattccttccccaacggttacggcatcctgtccgaaaacggcacgctgctgtatcacaaccggaaattcctggagctgacctccgccataaccggcgaacctaacctggagcagatcctgaaaaagctgatccccgccctgccctttcccctgggcggcacgcccaggaaccaggaatacggcaaatcctttgagcgggaatttgacgagatcaccctgtcccaaaaagtggaaaagcattattttgcaaccgggtacgaggttctgcattatctgtccgtcgcgccgaaggtccaggccggggtcaccgccgcagccacgcccctttcttccgagatgcttctgaagtacggctttaccgtccgcgagaccgaggtcctgcggctgctggcccacggctccaaaagtcaggagatcgctgcctctttgtttgtcagcgagtcgactgtccgctcccatatccggaacatttattccaagctgggcgtatccaaccgcatggaactgctggccaaactccagccggagtccgctttgtaatatgccgcacagcgccgcccgggcatttttccatcaaacaaaaaaagccgccgcttctgccgtcaaaaaatcagacggcagaagcggcgtttttgtgtgatgaaaattgatgagtttcgatgactttcaatgatttcccgattactttctgacgatttgagatcatattctcttgcatggccaaaaagccatgctataatccaaaccagaactgaacaagcgggggagccgggagaacgcccggctgagattagggcatcgcttgcccttgacccttttgaacctgttgggtaatgccagtgtagggagtttgtgaaaccgttttctgtgtttgcagcgccgcccaaccgggcggcgttttttattttcacatcaggaggtaatttccatgaaagcatccgtagccatccagatcgaacccaatatgcccacaagcgccgaggccatccccgtggtggacaaggtcatcgactacatccgcagcaccggcctgcattactacgtcggcccctgcgagaccgctgtggaaggggaaagccttgaccagcttaccgacatcgtcaaaaactgcattttggtcgccgaaaaagccggcgcgcccaaagtctccgcctacgtcaagttcaattacagccccgcaagaggagtcctcaccattgatgaaaaagtcacgaagcatcatcaataagctgccggctgtcgcggcgcttgcgcttttgctgctggtgtggcagctggtgtgcaccttggaacttgtccccagcttcatgctcccctcccccgtggaggtcgtcgccgcactggtccgggagtttcccgtgctgctcagccacgctcgcgtcactctgaccgaagccgtcctgggcctggcagctggcattgccgctgcgttttttcttgccaccctcatggaccggtttcccctgctttacaaggccctttatccccttcttgtcatcacccagaccattccctccgtggccatcgccccgctgctggttctttggatgggctttgagatggccccaaaaatcactctggtcgccattaccaccttttttcccatgaccatcggcctgctggacggctatgcttccgcagacaaggatgcggcggagctgctgcgcgcaatgggtgccagccgtgtacagattttccggcacctgaaatttccctgtgccctcagccactttttctcggggcttcgtgtctccgcctcctatgcggtggtaggcgccgtcatctcggaatggctgggcgggtttgaaggcctgggcgtctacatgacccgcgtcaaaaaggcctatgcctttgacaacatgtttgcggtgatccttttcatcaccgcggtaagcctgctgctcatgcagtgcgtctccgtgctccggaagctggcgatcccctgggaaaaatacgaaaagcttgagaggaggacttaagtccgtgcgtaaactgatttctctgctgtgctgtgcaggtctgtgcatcagcctttgttcctgtgccggggaacccgcatccggctccgacgtatccgccacgccctctgacgcggaagcccttgaaaaagtcaccctgtgccttgactggacgccaaataccaatcacaccggattttatgcggcgcaggctcttggctattacgaggaaaacggtctggatgtggagatcgttcagccgccggaggacggagccaccgccctttgtgccgccgggcaatgcgagtttgccgttactgcccaggattctctggcatccgcctttgcctctcccgatccgctgcccgtaacggctgttgccgcgcttcttcagcataacacgtccggcatcattgccgttcccggggaaggcatgtcccaccccgccgggctggagggccacaactacgccacctggaacagccccattgagctggccatgatggagtatgtcatcacccaggacggcggcgatttttccaaagtggagctgatccccaacagcatcaccgatgaggccggcgccatccaggcccgtcaggcagacagcatttgggtctactacggctggggatgcatcaatgccgaactgcgtgagattccttttgactttttctatttcaaagactactccgaccagctggactactacaccccggtcctcatcgccaacaatgacgtcctgtcccagaaccccgacctggccaaaaaattcctggaagccacccgccggggctatgaatacgccattgaaaatccggaagaagccgcacagatcctgatcgacggcgacacgaccggctctttgaaaaattctcaggagctggtcgtcgcaagccagaaatggatgtgtgaccagtacaaggccgaagcggagcagtggggctatatcgaccccgcccgctgggacggcttctaccaatggctgagcgacaacggcctgtgcgaaagccccattgcaccggggaccggattttccaacgagtatctgtcatgaaaactgcaattttaagcgcaaacaaaatcacgaaatcctatgacggcaccgccatccttcgagatgtctcccttgatttaagagagggggaactggtttcggtggtgggcgtttccggcgcgggaaaaaccaccctgttccatatcctgtccgggctttctttgccggattccggcagcgtgtaccttcaccagaaggagatcaccgggcatccgggtcaggtcagttatatgctgcaaaaagacctgctcctgccccacaaaaaaatcctggataacgtggccctccccctgatcctgcgcggagaaccgaagaaagccgcccgggaaaaggctgcccggtatttttctcaattcggtttgcagggtacggaagccatgtatcccgcacagctttccggcggaatgcgccagcgggcggctttgctgcggacctatctggggtccggcggcgtcgttcttttggacgagcctttttccgccctggatgctctgaccaagcgggagatccatcgctggtacctgcaggtcatccgcgagatcgggctgtccaccctgttcatcacccatgatattgacgaagcggtacgcctgagtgaccggatttacatactgggcggaaaacccgggcatattgtttccgaactggagatcaccccgcaccatccccgccccgatgatttttcctccggtcccgcatttatggagtacaaaaacgccattctatcctgcctgtaacattttctctgatatctccttgcctttatatattcctttcccctctggcagcaagtgcagaacacccggcgcctccgtcccggtgttctgcacttgcttttttgatgcagccgcctttggttcctacgtccgtaccggaataccatcgtaagccgcatcgtattttccatttccattgcagccgcgggtcaacagcttctcctgcaggccgcaggatcgtgccggccattgcttcgttgttcatcggcaagagagcccgactgaccggcaccttacctctgaacccgccccgaaggggatggtgcacagccccctttcccactaatcaggccacgcagggacccgcgtactttccaacagtccaccggactgttggaaccggccgggacgctgaccggacggacgtgctgttctcgtccccaggtaccactgattaagagtcagttgctctaccgaatgaccaatgctaagataacaatcacgtttatcaataacttcgcgacattcttatgaactgctccgaccgttcctctggtgaagcggagcgttcgtaattgcttcgatcagaatcgaaagattcctgcacagttgcaccacatgattaagctatagctctgttttgcttccaataagctctttcgaaatcagcagtagtgcccctgccaacagtcccagcaagcaactgacgatcgagagaatttgggtgccgagcagatgatcccgaattgcatctgtcaatgagacaaacgccatcaaactctgctgagtaagatttttcaggtcaatccagaactccatatccgaccaccggctgggaatcagccagcgaggcagagccgccaaaagttccggcaatgccatggcggccaacaggagcagcgcaaatcctgccgcttgacggcctatctttccaagagaaagcagtacccacatttgatgtgccaatatcagcgctgcaaagatcagcggtatccaggcggcggcatttaccatctgacgcaatgtgcctgtgggcagcagtatcgtgtcgttttccgaaagtccagcactttgcagaagattctgtatcgttccacgagggtcgtttccgttcttgagttccagggaagcagctgtatatccggcatccacggcagttccttccgggcagatcagaaagcactcctctccttccaccacaccggtgacatggctggtttctcccttcatcaccagctctaaccctatcacttcacggcttccgaaaagggcatctgccaaaccggcgctgacggcacatccatccaactgtcctgccccgggagcgctcccgtacagatagtgagccgggaagcagagggttgggctgccatacacagaaatgcgctgcgccgcagaacttcgccccaaatccgtggcaactgtgaccgaatcttctttccaaagtgcgagattgagaccgagatcttctgttgccctgctgagagagtcggcttgctggatggtgagcggatctccaaaccgcagttcatatccgtttgcaggaagaactgccgtcaaattgaataatcccccaagggagagcgccatcaacacccaccccaatatcgtccacatccattttttcatgatgccacccgaacccaggcgccttccgaaaggggtttgtccgctccggtgactacctgcccgctgatgctgccggaaaccgccgccatgccatcgccttgtgcttcaactgtaaccggcaggcgaatgagcacattctgtgtacccagcagtgtggatcgctcctccatcaaatagacaaacgtaccggagctgtctgtctgaacggcagtagccggaaggcattgttcgtactgtcctgcgttcagtttgatctccactgtggcgcttcctgccttccagtcgccggagtttaacatggcagcaaattgtatgctcccgtcctccgattgctcagacaatgccgtgatggttgtttgcgttgattggcttccctgcttcacggtgatttgcgttcctgctgcggcaaggcgggcagcctcctgttccagcgtaaaagtcagcacgccggcggcgtcttggtcggcaagcagtcctgccaccgacgaactgttttgccctgccacaagattcagctgggtgagtgttccatctgcaggagaggaaagaatacaatctgcctcttccagtgcctgcaaggctgacaattccgcccgcgcaatgtccagctgagcttgcgtcacagcggcctgtgcctggttggccgcgtttgtcctggcaatgtcctcagcggactgatcgtaattatgtgcggcgctgttgcgggcatcctcatagttccgggcggtattcgccgcggccttgtcggcagctgcagcgctttcctgtgcggcggcaagggctgattcggcagcattcagtgcagcttgtgcatcggcgattttctgctgacgctctgcctcagcactttcgggggttgccacaggctggttctggagagaattcagggtattttgggctgcatcccgttgctgacgggctttttcaatagcatcttgcccattctgccatgtttgctgcgcatcggaataggcgcggtccagctgctgctgggcttgctggagagtaaagtcatctgcttcgtccgaattggagagctgtgcgacagaggtttccagttgcttgacctgggcctgtttggttgccaatgcctgcttcagggaaacctcatcaaaccgggcaatggcatctcctttggaaaggctttgacctgttgcagcagtgacttgtgccaccagcaccccttccgggacagtaagcggcgtaccgccctgcacggaaatggtgccggatatggtactgctttgggtaatagaacctgcacttgcctgtcccagtgtcacttgaggcatgcttgccccggcaattccccgggctgtcagcgtaaggatgagcatggcggcaaagaatttgaccactatgccgaggcgcccggcctgcttgggatccctgttgctccacgcggtgaaagcggcgcggatacggtagagcgaaaatcgatgcttcatggaaatatgtccttgcaatccttgttattctttcaggccgctggcctgtatccccagttccagatagggttgaccaaagcggaaaatcagtgcggcaggtgccagcatcatcaaactggctgccatggaggcggccaacgtctggccgctggtgccggcggaagaggcaagatagagggacagcggccagcgagaaggatctttcagaaaggtcatgggctgttcaatggcgttccagccttccagaaaggtcaataccatcgcggagagaatccccggcattcccagcggcagtccgatgtgccagaaggtccgaaacggcccggcgccgtccagagcggcggcctccagcaaagctgcgggcacagcgtcgaatcctcgtgccataatgaaaacggaaaaggccgaaaagcagccgggcagaatcaatgcccagtgggtatccagcagccccatctgattgagtaccagatagttgggcaccatcgtgacctgaaaaggcagcagcatcaaaagaacgtacaggttcatccaaaatcgtcgcccgcgaaaccgcaaccgggacaaggcccaggctgccggggtgcagaagatcagctgccccagcagctggggaaatacctggatgcagctgttccagaacatggcaaaaaactggggcgtatccaagagcagttcgaccaagggctgcagggtaggccagctgggcagcagctgccaccgcaccgcctcagctgcgccgtcgctcaaagccgggccgatggtcgccgtcagttcatccgccggggtcagcgccccaaagaagagaaaccagagcggccaccagacgctcaacgccgcaatgcccagcaggacggtgagcagcacgcgggtcactgcgggcttcacgggttcaggatggcaacggtatccgcagtgaaaccgtcgtctgttttgctgccggtgatataaacaaaggcatttgcctgaaccatatcagccgaaccctctgcctggctggaatttccatttccatctgcgtaaatggtaatataccgggtatcatcggtacacgtcacggaaaatcgggaggcggttcccgcttcagccataacggctacgccggcgttctcactttgacgctcaacaacagtcggggaaagagaaaaacctgtatccgtcatttccaccacagatccggaataatctgccgaaacagggtcaaaaagaacttcttccacagcggaggaggtttccgcttcaggcgtcgggtccggttccgctgcggaaaccgcttccgaatccggtgcggggtaagctgtaggctccggcgtgggggtgatcgttggcgtggctgccggctgcgccgtgctttccgggtgagaggtatccggcgcggcggaagaagcgctgtgggaagcagccccacagccagtcataaggaacacgcaggcagctgcagtaatcacaaaaacagagaatgccttcataacaaatcctcctttagaaaattatttgtcccggttccatatccgctgcaaggccaggatcaagccggaaaggaccagtgccataagcacggcggccgctgtcaggcgtggcagatccagagaaaggaaccagttgttaaacaagtgctgtaacagatacatgctttcgtgcgggtagtttccgcctaccagaaaggcctcccggaaggctttgaaactgttgagcagactcaatatgccaaccaaagtcagggtggggagcaggtttggcagtgtgatataaaaaaacttttgccaggcattggcgccgtccacggaagcggcttcatacaggtcggcggaaataccgtccagacccgccagccagaggatcatatcatagccggcgtttttccagacataggtgaataccaatacccagaaggcggcctccgtccccataaagtccaccgcctgtcctcccagagcagaaacaactccattcaccagcccgttttgggcaaacaacaccttccacaggatcacaatactggccacggggatggccatggggaggagaaaactggtgcgaaacactctgcttcgacgggtgtccttgccatgccggcctttggctacggcctgtacccccagggccagcaaaaggctgcacaccagaaggatcggcacgcatgtgcacaggaaccggaccgtattgcgggctgccagttggaaggcggtgttttctatgaccgactgataattggcaaagcccacaaactttttccctaatgcatcgcaaaagctgcgccgcaccgtttccgcaaaggggaccagcacaaaagcagccgtccccaaaaggctgggcagcagaaacaggatcgcagccaggccgtccgaattacggcgtggacgcaataagtcacgccgccatgaaatcctgtggggcggcagggcggggcgttcaccggctgaccttctcatgtcttagccctgctcggcaaagcggagggaaaggtcactgacaacgccggcaaccgcctgatccatcgtctcactgccggacagcagcgccctggtgtgggcgatcaggctgctttgcaaggcatcgtccaccaccacgggagcagaaagctgtgccagcagttcctcaaaaccgccggtgtaaccgttttcctgcatttccgacatattacggtcaagaaaggcctgcatccccgctttggtcaccggcatgccgtcatattggaagctgccctgtacctcgtcgccgaacaatgccttgacaaacgccgctacataatccggctggtcgctgttctcacaaactgccacaaagcaggaaggcaggtaaacaccctggcaaagtcccggctgcaggatggtctgcccggtggcccgcagttctgtgtcggtagcaccaagccaggcgggggtcgtcatgctgccgtagccgaacacagcccgggaagcctggccatattctgacattcccgcattccaaaccatggtatccacgccaccgaaattgcttgccgtgccgctcatggtatcctgctcagggtagctcgccatgttgtagtactcccctaccgtctgaatgaactccatcagactgcgcagggcagcttcatccaggccgtccgccttgagcagcgcgggctgagaagtctgcaaggcaaactggaccaggctgtccacgctgtcaaagcccaaagcatatcgctgggattcgtcaagaggtgcccagctagtctccgcagggcgcggtgcatattgctgtaccaatgccgccacatcatccagggtagtgactccatccagtgtgcccgctgcgccgtgcatgaccgggacggtaaatcgggcgggcagcgtaaaaagtttgccctcggcgtcggtataatcatcagctacaaactcatagagactgcccgtgtccacgattccggacagatctgtcaacaggccactgtccgaaaaggattccagatccgcgccatccaaaatcaacaaatccgggccttcccccgccagcagctctgtgttcagcgtccgcagggcatcgtctttcgtcagcccggtgccttcctgcatggccacctcatagtccactgcacagtcaggattttgctgggtaaaggtctgtatcgcggcgcggacggtagcattttcttccagactccagacttccagcgtatcggccgcagccgagagcgtcggatcaaaagaataccgatacagttttgtctgcatggaactgtcgctgagaaggaccagatagctgccgtctggggcacagcacagttgggaaatataactgctggaaagggacagtgctgtgcctgtactgtccaccacctgctcacacaggctgccgccctgtgcctgccggtagatgccggtactgtcggcgtaacagatcgcatcatccgtccccatggccatttgggtcgcgtaagggtctttcaggaatccgctctgtaccgtttgggtggtaccgtcctgatccgcccggcaaagatcgccgtttgcagaaaaatagtacaggaaagaatcgttttcatcgccagccggcaggatgcccgcaatgtcattgtcgccgaaatagacgttttcgccatcgccgttgatccccacgccttcccatccctggtttccgccgcttacctggacccagcctttcaccttttgggtatctacatcataaaaaagaatgttcccgggcatggaaagtcccggtccgcccgccgggattgctgccagggtgccgtcgggcagaaaacacatctgagagatagtaaagctgctgccgtccacattcagctccatttgggtcaggctgccgtccggttttgccagccacagagtagactccgtggtggtaaaggccacggtgccatcccgacgggcagtccagcgtgccagagtgcccgccttctccgcccagtccagattttcagactgccagctggcgccgttgtcggtggaagtcagacggacagtaaccggcatatcggtgctctcatcccgggcataaagaacaagactgccgtcttcctgcgcggcaggcgaactggttatcaccagttcagcgggaattccggtggcctgctgctccagccagcgtccctgggggacggcattcgtctgggcagcgttggcatcagagtcggagagtttcccgccggaggccgtacaggcggaaagggaaaacaccagcattcctgcaagaagtggtgataggattttatgcacagatttcatagctgcctcccaacaatcgtgtggaattcggaataccggcattgtaacaaaacagtctggaaggaacctgaaaggtttctttcaggttttttccagactcgttagatagactaagaatattcacataataggtgtatactgagtttttataaaattgcggcggcagaaagggaatgtccatgcggatcttactgattgaagatgatgaggcactttgccgggttttgcagcccactttgcaggcagcagggttcacttccgattgctgccacaacggctccgatgggttggaacttctcaaatccggatactacgacgcctgtattctggaccggatgctgccagaactggacggtctcattctgttaaaaagcgcccgggccgatggcgtgaccatcccggtgctcatgctcactgctttggggcaggtcggtgaccgtgtggacggtctggacgccggggctgacgactatctgacaaagccttttgacaaccgtgagctgttggcccggctgcgggcactggttcgccggccgacagatctgaatgaggcgccccaccgaatttcctgtggggatcttgttttggatacctcccagcagactttgacgggtccctcctccaccgtgacgctcagccgccgggagtgtgaccttctggcggtattttgccgggctcctgacctgctgcgtgcacgagccgtgctgctgggcagcgtatggggatcagatgcggaaattgaggattgcagcctggacagctatatcagctttatccgacggcggctgactgccgtcggcagtcgggcggtccttcggaccgtgcggggcgcgggctaccgctttttgcctgacggcgaggaaaaaccacatgcttgatcatctccgacgccgcctgacgctcctgttcagcctgctcaccgccgccgttctggcggcagccttgacagcgacctgccgaatggcccagaacgaggccgtatccggtgcggacctggtgtttgccaatacggtttcgaccatcgaggatgtggtgagcgagaataatctggttcgtgacagctggctggccagtcaggagacagccggccgcctggtcctgtatttggaggacaacggccagcctctcgccttttccggcggatggacaccttccgatgaccgcactgtactggtggctttggccaaggagcaggcagtcgcagccggactgaatccggacagactgcaccggcaaaaagtaagcttttccttgaatggggcagagctcagcggctcctacacctgcactgtattgctattgcccagtgagcagatgcccagtgcggttcttgtgtacattatccgggatataggacctttacacgaccgccttctggccatggtctggcaatatgcgagcctatgggctgccggggccttgatgctggcattgctttcccactggatggtatgccgggcactgcggcctaccgcccaggctcttcagaagcagcgggaattcgtagcggctgcggggcatgagctgcgcagcccgctgactgtgttaaaggcaagcctgcaagctgcgcaggcgcccgaaacagccaatctggctcctcaatttttaagccacgccacatccgaggtggatcgtctttcccgcctgaccgatgatctgctgattttggcgggaggtgatgccggggtgctgcgtacatctctggcccgaatcaataccgacacctttttggtggagctctatgaaaaattcatcccggttgcccgtgaccatgggcatcccctaaccatccacctgccagaaaagcctttgccagacctgcatgcagacgcgcaacggctagaacagctgtttgccgtcctgttaaacaacgcgtttgaatattcccccgtcggtactcctgtggaaattctcgcagaactgccggcctccggcggcctgcgcatcgctgtggcagatcatggtctcggggttcccgacgcagaaaagtcccgtatctttgagcgatttgcccgtggtgaccgcagtcgcagtgataaaacgcatttcggccttggtttggctgttgccgaccagatcgcatccctgcacgaagcgactttgcgtgtccgaaacaccccgggaggcggagccactttcgtagtggagtggcgctatgaccatgtattgcgccgggcttgactttaatgaatgcggttatgtgtttccttgaagcatccccgcttgaatgcagataatcgctgcattcaattcttctgttctacgttgaatttacagaaattcacagataaaacggcaagggccttgcagtgagggggttccccctccgcaaggcccttgctatttcatgaacttgagataaaaaacaaatccgaacgcacttctttttgaagattcgttcggatttgctttttacagtccagacggagggagcattttttagcggcttccccgcgagctgaacgcgagtgcttgcgcggcgcacgagcccgcttaagagtcagttgctctccgcagtgggcaatgccaaggtagtagttacttttatattgaagcgccttgattttcttggcatccagttttcatctgcaatgctcagcatcctgctggcaaattttctgctcaatgctcttgtcacacggtccacccttgatcttgcagaacaggcatgggcgtacaccagcacgattgcatccaagaactcaacataaattctccggcggtagcccaaatggcgaaatatggaggcacagggatcctattcagacgagaggaaaggaaaccattcccaacgtttattttcaaatgatgaccagatcttttttatcgctcagcagccgacagatgtgttggacaaaatgatctgtcataggtgtcttgtccaaaaaatacagccggatctccaaaggccggtaggcaaagggaatggagcggtcatgttccacgggacacggatataaaattatggcatttcgctgcaaccggaagagcagtgtgtttcggtcttccttgtccaaaatgtgcagactagttcctgcccgagcatccagcgcctcatacagttccctgtccagaacggcagagatgtagatatcatagggtaaaagatcctgaaaggcgacgctcgcttgttttgccaaaggatgactgcgccggacaatagcatggacctgggttgtacccagcagcaggctgggaatgcccggaaagtctcccttgtgaggattaaggtagacaaaacagtcaatgatcctgtcctttagagccgagaccagttcggactttttcatcctatcaaaacgcaggaattcaccggggtaagcctcgtcatagccgtcggtcagacgagagacaaatccgtaatcaaagcggacactgtgccccacccgcagcttgttgatctgctctttctcagccaggcgggcagcctccaccgattcatggacaagatccagaatttttctggactgttcctgaaagacttttcccgccggagtcgggacacagccggaagaagttcgcagcaaaagcggaacgcccacttctccttccagagaatcaatttgctttttaattgctgctggcgtgataaacagcttttccgccgctttggtaaaactcttttccttgcaaacataaagaaaggtctccagtttcccactgtccaaaccgtatcctccttcgcactccacacgccataatttgactatttttattatatctttgcttttactttttgtaaacgccgtctgaaaaaagcgagaattcacaacagttgatcctctggtatactggaatcaagaatcaagcatccaggtgttctatcgttacttccgccgggatgccgtcgtcgtccctggaggaaaattcatgaaaatcatcgacctgatcagacatctaacagcagacaccgccgaccgatggaacggtcaccccatcgatccctccaccacacgggaccagatcctctacggcgatcccacccagaaatgtaccggcatcgtcaccacctgctatgcttcagtagatgtgatccgtcgagccggtgaacagggattcaactttctcatcgtccatgaagcgctgttctggaatcacggagaccggaccgactggctgggcgacaacactgcttttctgctgaaaaaggcgctgttggatcactatcacatctgcgtctggcgaatgcatgatcacattcatgcaggtctacgtaccgattacggatatcgcgacggcattttcggcggattgagcgccatgctgggctgggagccgtatgagcttgcgccccacgcccggatgccccaggattttcttttgccagagacctctgtagatcaaatggcccggcatcttaataacaaatttcacttgaaggggctgcggttcatcggcaatccggactgccgcattcgccgaattcatctgcccatgcacattctgggacattcctccgacaacgacctcatcgcccgcatcaaccgggaagacattcactgcctcctcaccctggaactggtggactttaccgtttgcgagtacgtacgggatgccgccatgctgggggaaaaccgctgtatcttcgccctggggcatttcaatctggaggagatcggcatggaattctatgccgggtatctccgccgccagctggacgaatcaataccggtagcctttttgcagtccggggacgcttactcttatatccccacctgaccctttgttttgattttctcggcagtgcgcgcctaccgcagaaaatagagtttgtccaagcaataccaatcaacgagaaggagtacatcatggctaaaatagacaacgcagcagcggctgctcaaattctgacagcagtaggcggcaaagaaaacgttgcggccgtcacccactgcatgacccgcctgcgcttcaacctcaaagatgaagcactgtccagcgacgaaacgctcaacgaaatcgattgcgtcatcaaagtagtgcatgcaggcaatcaggttcaggtcgtcatcggccagggcgtagaccgggtctatgacgaggtcctcaaggccgtgggcggtgcctcggttgattccgggaatatcgttgctcccgccaagcaaaaactcacccccaaggttgtggtgaacaacattttcggggccctgagcggctgcatcacccccattttgccggtgttcatcgtagccggcatcttcaagatgattgccaccttgctgggtcctgacaatgtgggcctgatgactgaggacaaccagatctacatcctttgcaatctggtcaatgacgggtgcttctacttcctgcctttcttcgcagcttacagtgcggcaaaaaaatttcaggccagccctgtttttgccatgatcatcactgcagtcatgctgcatcccaacatgctgagtctggttgaggccggggaacctttccgagtatataatattgttcccatgtatctggtcaactacagtcaggccgttgtccccatcattctgatcgtgtgggttttgtcccatgtggaaaaatgggtcaaaaagattgtacccgatattatccgtgtgctgggtgtcccggtattgaccattgccatcatgcttcctctggccctgtgcgtgtttggtcccgcctgttatgtggtcatgggctggattgctgatctcatcatcctgctcaacgataccgtcggtattctggctatggttctggtcggcgcaacctgggcactggtcatcaccttcggcatgcatgtgcctatcatgacagctctgctgcccgcttggatgaccatcggcttcgattccatcgtcagtcccgcctccatcgccagcggtctggccaatctgggcgttgagctctcttattctattcgtgctaacagcaaagattcccgggagctgggttggacctgcctgacctccaacgccttggcaaacatcggcgaacctttcctttacgggatttatctccgtgaccgccgtgccatgatctaccacatgatcggcggtgccagcggcgcattggtcatggggctcttgggcgccaaggtctacattttctccggcgtgggctttccctggctgaacttcctgcgcttcggcgaggatgccgttcagggtgccatcggtatggcagtggcgtttgcggtgcctctggtactgggtctggtttttggctatgaaaaagaagccaaagctgactgagcaggaaaggagagtttgtatgcccctgccgaaaaatttcttgtggggcggcgcgttggctgccaaccagtgtgaaggtgcctggaacgcagggggacgaggcctttccaatgcagacgttttgccctacggcaatgaccgtctgccgatcatcaaaggagatcgccccatgctgtttcctgacagcgatcaccgctatccagcgcagaccggtgtggatttttatcaccattacaaggaagatattgctctctttgccgagatggggttcaaggccctgcgcctgtccatcgcctggagtcgcatctatcccaacggcgatgatgagcggcccaacgaggaaggtctgcgcttttatgaagatgtttttcgtgaatgtttgaaccatggcattcagccgctggtcaccatcacccactacgatattcccatgcacctggtcaccgcctacggcggctggcgcaaccgggagctgatcggcctgtacaagcgtctggttaccaccttgttccatcgctacaagggcttggtcaaatactggctgaccttcaatgagatcaacgtcatgacctccgcttgctttatggcggcggggttgctgttccggaccggagaggaccgctatcccatcatctgcgacgcggttcatcatgtgctggtggccagcgcctgggctgtaaaactttgccacgaactgattcccgatgctcaggtgggctgcatgctcaatgcgggcatctactaccctgccacttgcaagccggaggacgtactggctgcccagcgggaaaaccgcaagcactatatgttcagcgacgtacaggtacggggctgctaccccgcccatgtacttcaggaatatgcccgcagagggtattgcccgccctttgccgaagatgacgaggagattttacgggaaaacaccgtggattttgtctccttctcttactattccacccgtgtggcagaggacggttccgacggcaaatacgactccaatcttctcaaatccgccggcaacccctatctccggcaggagccctgggggcggtttcttgatcctgtgggcctgcgcatcaccatgaacgaggtctacgaccgataccagaaacccctgtttattgtggagaacggcctgggtgcaccggatgttcccgatgccaatggttatgtggaggatgactatcgcattgattatcttcgggaccatatccgggagatgaagaaagcggtggaactggacggcgtccccttgatgggctacacctgctggggccccatcgacctggtatcggtggccaccggcgagatgaaaaagcgctacggctttatctatgtggactgggacgacgaaggacacggtaccatgaagcgaagccgcaagaaatccttctactggtacaaaaaggtcctcgccaccaacggcgaggacatggactgaaaggacggcatcaccatgaaactgcttctgcaagcagatgactacggaatttcccccgccgtggccctgggaattattcacggcatccggcacgggcttatccgcaacaccggattgttttccaacatgccatgggccgcccaatgcgtggaatggatccgccccctcctttcagatatcgcctttggtctggacctgaatctgactaccggcgcaccgctctctccaccggaatccatcccctccctggtgcgggaggatggcggctttcactccagcggggagagccgcaagctggatgccgaacagggctccgaccacgccgatctccgggatgtactgcgggagtgtgaggcccagctgcaggcttttgtcgatctggtaggaagacagcccgattacatccatccccacgcctacacaactcccaggattctggatgtccagcggacactctgcctccagtacggcattcccttttcctccgatgtgtggaagaatcttgccgggtttgatgtggccaattaccgtattccctggtatcagaaacctgccaccctggaaaaccaggcggcctcttccctgcggaattatcttctggaacacggtgaggaactgctgactcgggaagtctgcattctggcagggcacatgggttatctggatcgagagttgctggatctatcctcctacacactctatcgccccaatgatttggcgggcgtcaccgatccggaggttctggcctgggtccgggacaattccgttcggctgatcacctaccgggacttgtgaacacgccaaggaaaggaaatcggatcatgaaagatattttgctttatatttccgaccagcatgcctggcggcagcaacactatgcaggggatcccgtcatccgcacgcccaatctggaccgaattgcagcaagcggcactgtcatgcagaacgcctgcacctcctatccggtctgcgtaccggcgcgcatgtccatgctcaccggccagctggccagccattgcggtgtcatgagcaacatggctgccctggattccaaccgggccacctttgtccattgtctcagcactgccgggtacgatacgattctctgcggccggatgcactttgtagggccggatcagcgccacggatttgcgaagcgcattgctggggatttcacccaggtctttcataatcggcccgcagcgttggccaaagagcgtggggtccatgacaaaacaccccaaggaggtccctcctgcctgagcatcatcggtgggggtaattctcccacgctggaatacgaccggtatgtagtgcggcaggcagaggagtatctgcagggcgactacgataaaccacagtttctctgcgttgggacctatgcgccccatcatccttatgtcgcccccaaagagctgtacgcgtattactatgaccgggtgaccattccgcaggagagtttctcttatcctgagcatcctgcccttcagggacggatcttgcaggacaccgacccagaggtggttcgtgctgttcgggctgcctactacggcatggtcgagtttgaagaccagatgatcggacgtgtctacgatgcttttcaggcttatcttgcccgcacaggacgagagggcgtgttcgtctatgtttccgatcatggcgagcaggccggataccgcggatattacggcaaaaacactttctatgatccatcggtgcatatccccatgatcttctctggtgccggcatcgtttccgggcggcaattcacaggtgccgtttctctcatagacattggtcccactctctgtgaattggccggcgcgactttcacgccggagccagatggcgccagtcttatgccccagctgctgggtggaacagagaatcaggatcgcatggtaatcagtgaggtgggcggagacattcgtatccgaaccggtcaattcacctatggacagatggttcgacaaggacggtataaattcatccattatgatggctacgacgcggatgacctgctcttcgacacggagcaggatcccgaagaatccacaaacgtcatttccctgcatcccggactggcagacgccatgcggcagtttcttgccgcccactgccagccggtagtggaaatacgccgccgtgcgcaagaatttaatgaaaatctaaagattctaggacgctgcgatttcgatgataccaaagagcgctggcaagtgcctgaatgtgcacgcaactatcccgatcctatggttagcagtaaacgctttgcaaaataattattttccatccgttttgtagtaattcttatttgaatatatgagaaagtccggccacatcgcttttgaagtggtcggacttctgtttgccccagtaaatatgtgcccgctctattcaactctatttcttgccaacttaacacatctcgctcagcaagacatcttggacgtaagcctgacgcaaccatttacttgttctaacgctcacaactagtacttgcgactcttttctccgcgagctgagcacgagccacagggcgaagtgcgaagccgccccgaaggggatggtgcgcagccccctttcccactaatcaggccacgtggggacccgcgcactttccaacagtccaccggactgttggaactggccgggacgctgaccggccggatgtgctgttctcgtccccgtctgcaccgggtttctcatttctgcaatgtcacataaaagaaaaatgccctgcttttcagcaaggcattttttggtgcaccatcagcgggcgcgttaagaaaacgttccagtggaacgtttttagcgaccggtccccgcgaggcgaatgcgagcgcctgcgcgatgcatgagcccgccccgaagaggatggcgcataaaaaaataccgcaacattcgttgcggtattttttggtgcaccatcggggactcgaacccaggacccactgattaagagtcagttgctctcccaaatggccaatactaatggtgtaatcaacactccccatgtggatcacctcccctcagaaactgccgataagttcctctcacatggatcgtaatcttgtaccccttccctacttcgaccttctcaaatagctgcgccaggatgactctttttctttcgaccgtggcaagactaaattcgttggcccagccaaggaactcatcatagtaactgcgaatttgttgtaccgttgttcggtcgtcattgttttgcaatagagctgcgtattcatcttttgcctgtctgacttctgcctctgcctgcgcaatcagccgagccagcatctcctgcgagaatgcgctctctccttccagacatttcagcacttcatcctcatagcgttgctgcttatactgggctgccttgatcttcttctcggcagcctgcttttttctgttatgatttgcttcttgctgacgaatcttctgttcgatgctcttatcatacggctcgcttttgatcatgcggaacagttcatcggcgtaagtaagcgcgattctgtccacccgttctgccaggtagagagactgaccatcacattcccgcagatgttggccgcgctggtaacagttgtacttggcctgcaccttttcccggatacttccatcggccagtttatatcggtctgtatgcaaaaaggccgacatcttcgccccgcaatgtgcgcagactacgatgccggccaataatgttggattgctgctcttttgggcagcatttttatctttcagtgcctttttgcttcttttgctgatcatctcgttggccttggcgaacaaagcctcattaatgatctgcagctgcggcatgaactctgaccgtgccgccttagtaatgatatatcccgtgtacccctcatgctggatcatccgtttaatgttggatgactgaaactccgccccttggcgagtacgcagtcctcgttggttcagcatctgtgccatggcatacccactggcgccttcttccgccacttttataaatacttcccggacccattctgcttcatctggattgatctccagatcctttacaggctggtctctcttgttgactctacctttattaatagcacggtatccgtagggaacaaagcctccggcgaaatgtccgctggaaacgatctgacggatacgatctctggttcgcatggaggtcttttcgctctcccctgccgcctgccagaacctaatatagttcatcagcttatcgccgtggctctcaattcgttgctggccttcgtgggtgctccacatctggataccatgctggacaaaccattccagcacaaagggcgtttcactctcgattcgtcccagccggtcgaacatatagaccagaagtatatcaaagtttcccttgcccgcctcgctgcgcagttcctgaatgacgtcccgcttactagcagaaactttggaacccgagattcccttctcggctttttccagtaccacacgccagccatgctcctgagcgaactttcggcaagcaatcttctgcatcgggatatcatcgtggtccacctggcctttcgtggaaacccgataggacagggccgcccgtggtgcatcgatttccagtcgcatttgttgggtcatgaagtacgaatcatccaaccatttctgatctgcctgcgagatctccacttgttgcccatgttggtcccaaaaagtcatcgttattcctcccgtattctcttagtatgggttatttgcctatcccaacaatactcattctgggacaggaaagctatcaccaatacggagaaatattcgccttattacgggtcagaacttgactggttaccctcccggagcttccgctctgcgtaagcccccatgatcatcgttttcactttttctagggtgtcctcgtcatccttttccgaaaagtatatggttacggagaccccctccacttcccgttccaagcgagtacgtccgtcaggcatttgctgtatgtattcctgcacactcgttcctttctttcgagcaatttgcaagtacccgatccagaccataaaggtacatctgatatcgcaaactcacatcagtggtaatcagtgtcacatcatttgcctgtaaatcggaaaggattttgcaaagtttgcttcgcttacgggaaaatctggaaagccgtgttattgccacagcatccaccttcccccggcgtacggccttcagcatggaaaacaaaccgggtctccagaaggaattgtcctttgtatattcgcagctttgcccgactacgcggtatccgctgcgtgcggcccaatcacagagttcctccaactgatgttcggccacagagcgatgcccgctgccggtccgtgcgtacagccagacgcgggggtaatacaggaccgttgccttggtgtagtccatctcacacctccgaatcgtaattcggaagagccatccagtgccggcctcccggttcgatccagccgcacttgacaccgaaggtgtggatgccatagcagagcagcgaagcgataagtccttccaattcagggcgaccacaatgcagatgctcggcatccaccacgatcaaaacatccacttcgccgtctgtcgcagcacgcagcaaatccgccataccggggcgcagcgtaagcggttgttcttcggttcctgcctgagcgtacagctcctgtacgcaaagccagcgcagcttgcgcagggctttacggcaaatcaggatttgttgccgcatggtcaggtttccatttttgacttcttgaataaaacagatagctcgcatgataaatctacctccttggatcatttgggcaaaaagtattccggacctttatgcgtccggtaaaatttccggacttcccggagcgaggctccagtaggcatcttcggcaatgcgtccagcaccgcccggtggtagcgcccgccgggggctgcgcgagggtcgaggatcgctaccacgcagctgtccgtttccgtgcggatggcacggccaaagccctgcttcagtttgatttgcatttcaggcacaatctcggtttggatataactgtgaagattgcagtattgtgtccgcagcgcttctcccagcggatcgggcaccgggaatggcagccgagggatcacaagcagggaaaccatatccccggggaaatccaccccttcccagcaggcaccgcttgcaaacaaaactgcattgggcagttgcttgaactgctgcagataggtctgtgcgttgcgccgcagctgcaaaacaggcaaaagaagtttgtccttcagcttttcgtagacatggcccatctggtcataggatgtgaacaacaccagtgtgtggccgtttgccgcatggaccagttcttcgatctgccgggcgatgcgctcctcctccggttcgctcttacgccgccgggattccgggaaatacaacatacagtttttctcataatcaaacggcgaaaggacttttaaattgcgtagcggcgtaccacggtccaagcccaaccgtttctcgatatgggaaaaatcctcccccacggccagtgtgcccgaagtcaggatcgcaggcttctgctcgccccaaagcgccgaggacaggcattttggcagatcaaatggcacggcacataggtctacaccgacccctccgccttcacgatgccaggtaagatagcgcacaaaggtgttgtctgtgcccagaaacagcggtatcagctgctgtattgcactcagcttgccgcacagtcctcggggcattgcttcgggcctctgtttcagaatttcgccgattgctttgtccagatgctggagcgccgcgattccggcctttgtctgttgcagcggtattgcccgctccactttcgtttccggcggcacaaatgccgcgaggaattcccgggtaacggctcgaagtttctgtgcgttcagtccgcagtggctggatatcagcagtttttcataggcgcgcaactctgccgaacagatccgccgggtgttcatctggcgtacggtttccggcagcttgtgtgcctcgtcaatcaccagggcctggtaatccttcaaaagcggcgtccacccgttctgccggtgggccgcgtctgccagcaggtaattgtgattgcagacctggatcgtgactgacggcccgttggatgctttcagatattgccggtagcggcagtccgaatgtgcgatgcagcttctgccgcaacaattcggcacgcagatcaggcggcgctcatagcgaggcaggttcggcagccggtcaaggtccaggcattgcctggcttcccggagcgcggtggcccgcttgcggaagcgtttccctcttgccgtgatctgcttttggcgaatcagcaaacgtacatcgcaaacgaagcgttcctttccctttcgtagcacggcacaaaccggggctcggatatatccattttgtattaatacatccgataaaaacggtatgtattcttccaagattgcattctgtaacatgatgctggccgtggagatcaccaccgggcgctgcatcggacgcggcctttgcagctgccacaaaacgcaggcgaccagataggcataggtcttgcccaggcccacaccggcgtcacacagggccacatcccggccaaacagggcatccagcatcgtatggcacaagcgtatctggccttcccgcacggccattccactggccggaagcacttcccggaagatctgctccgcttgcagatgggctttctcgtatccggtttctggattcgtcaaatcaatcatctcctccgttgagttgatggcaaaatgatgcagcgcagcagtctgtactgcgctgcacgggttcgacatcaactgcgagttgatgctcttttgaaaaaagaaaatgccatatttgccgctcgccccctggcacttgggaacacggttcactttcgttaggcagccgcttgcgcagccttcactggcgttccaggagtctaaggattgcaacccaaggtcggccaccccgtctgacgtgcggggcaaacagggtatcattatctcccatgcagatcatggcgaagccgctttcgctgctctttcagcagaatggatcgctcggcacaatctcaccaccttgccgggtgtgagaatgtacgtcatggcgcttctctgatcacgcttcctacaccgggaacgtacctccgtgctgagtattcagttatcaaggttctggagcagtactactgcatcaaggcaaaatcatgaaggatactctgtataatttcctgatccgactttggtaccaatttcataacgcgataaaggaaatcgcgttgaactgaagttagtctaggctttttagggctatacccttctataaaactgataccaccgttgtaacgccctcttgttgtttcaattgggtatgtaatagataggaaatcaacatcagttctaatggtgcgaatggacacattgaaccgggaagccagatcgcgcattttaacgcgcatttttgcatcgcaaagaatttcaacgatctgacatcgacgctccattgcatccatcgcaccacctcccttcctttgccttatctctatcgtaatggctaaataggaaataaaccttactatttaaaaaattatttttcacacaccttaaacccttcattttactaaccaaggtattgtttcggtggtgatctacaccttacgtttagagaaaaaacaaatagagcagaaataaccgctattcgtaatgcggattttctgctctttggaaaaggatggaaatatttttctacaccgtcattcagtgcgacaaagtcatcaattaaaaatgtttacatgtgttaggttcccccacccggtaaaccttgccggcaaatacatcgccctccaatccgcattatttttccatttaatttggaattattattcgttcacctctgatttcgacaaagatacaatatatttataagtaagcaaatgtcgaagtaacatatcttgaggtgaccgaaattgtacgagttttctagaaacctcgcctcggtagtacaggctgcgcgaattgctcacggcttaacgcaggatgaattagctgaacatatcggcgtctcggggaaatctatttccaatatcgaacgtggtatggcgaatccagaattcgggaccatttatagtctttttcgcctcctaaaaattgatgcaaactctgtgttttaccccttggatacacaccatgactctctcgagcatcagtttcatcgcctgattgcaacttgctctcacgaagagttagaaatcctgttagcagttagtgacaccttgatcgaacatctacacaaaaaagatgccgttaatgctattgataccgattaaaatggcccgactttctctgatttaggaaagtcaggccttctcttatttttatagctttgaagagagataaatcttctgtctaactatatctactgccatctcttttttacaccgggcacaatataatggaaaacgaatgagaatcgagtccgcatatattttagtttttgttttcatcttgcagtacggacaacgcacccatgctgattcatctgcggatttattcatattttcctctttccctaaaaacagctaatttcctcacgttcattcgttctttccatatatctcttttgggcgtctatcgtattgattcaatctgcgtgattttacccgaagaactttcctctatcagtgccggccgaatttggctttcagccgcggcccggccacctggatgaggatgacgaggatgaggatgacgcccttgatggcatcgttgatgagggaatccatcttgagggccacgatgatcttgtcgatgatggtgtagctcatggcgccgaagagcacccccaggcagcggcccttgccccccgccatgctgatgcctcccagcaccacgctggcgatggcgtacatctcgtagctgttgccggtggtggcggggtcggcgctgccgttcatggcgacccagaggaacgcccccagccccaccagcacaccgcagatgacaaagacggcggttttcatcaggctgacatggatgcccgccagccgggcgcccttttggttgctgccgatggcgtagacctttttgccaaacttggtgctggtggaaagatagacgaataccacggtgagggccagcagcaccagccccaccaggggcagggtggccagcttgccgttgccgaaaccgtaaaaagcctggtaggaagccaggtcggtgtccatcttatacaccgaggacccgcccccgatgaggtctttgggcaggtgctggcagaggtactgggccagggaacgataaatcagcatggtggccagggtcacgatgaaggcgggcatctccacaatacccaccagcaccccgttcaccgcccccagcacagccccggccgccagggcaaacaccagggtgagcaggatgctgccggtggtgttgaacaccaccaccgaaagcccggcgtccatggccaggatggagcccaccgacaggtcgatctccccggtcaggcagaccagccccatgcccagggccagcaccccgatgaccgccgaatggcggaagatgttcatgacgccgctccaggtcaggctgctgctggtgagcgcccagaccagaaagatggccacaaagaccaggatatagctgtactgccccgccagccgggacagggaaggtttggcagaggttttcatgagggttgttcctccttggcaagggacgccccggtggaccagagcatcacggtatgttcgttgatttcggcgtggggcagcatccgcaccagctgcccctcataaaagacggcgcagcggtcggccaccttctgcagttcgggaatttccagggtgttcagcaggatggtcttgccctgcccggccagttccaggatcagggcgtaaatttcctccttggcccccacgtcgatgccctgggtggggttgtccagcaaaaggatgcccgccccggtgttcagccaccgggccagaaagaccttctgctggttgccgccggacagggaggtgatggcatcctgcggtccccgggccttgatgtgcagaatttccttgtagcgctcaaatttttcccgttccgcctttttgcggatggggaaatcccgggccgacagagtctgttccgccagtgccagattgtccatcaggtccaggtcgggaatgaccgagttttccttccggttgcccggcagcatggcaatgcccgccgccatggcccggtggatggagtcgggcttcacttgcttgccgaaggccgccacggtgccgtgctgcaccggcagcgccccgaacaccgcctgcatccactcgctgctgcccgacccctgcagcccggtcaggccgatgatctcgcctttttgggcactcaggctcacgccggaaaagccgggaccggtaaggttttgcacctccagcacggtttccccggtgggccgggggatgtactgtgccccctggcccgccggatggcccaccatctgttcggtgatcttttccggggtggtttcggcgatggcccctgtggcgatgaaccggccgttgctgagcacggtgtaccggtcggcaaaggcaaacacctccggcatcttgtgggaaatgaagaggaaggaggtgccgttctgctctttcagacggcggagaatggcaaagagatggtccacttcctgggtgttcagggcggtggtgggctcgtccagaatgatgagcttggcctgtccccgcagggctttggcaatttccagcagctgtttctggctggttttcagataccgcacctccagggcggggtccatctccacccccatgctgtcaaacagggcggcggcttcccggtgcatccgctttttgtcgatgcggcccaaaggccccaccggctcccgggtgaggaagaggttttccgccaccgtcagatcgttgaaaaggttcagttcctggtgcacgaaggcgatgcccgcggcttcggaggcctgcaccgtcatatggtcgtaggtcttgccgtcaaacacgatggtgcccgcgtccctgccgtacaccccggtgaggatgttcatcagggtggatttgcccgcgccgttttcccccagcagggcatgggcttcggcggtgcccaccgtcaggcggacatcctgcaggaccggcacgccgtcaaaggctttgcagatcccgcgcatattcagtaattccatcttggttcccccgttggatggtgatacacaaagagggaggcacccgcccagcaggcccctcccgttttctataagccccgccccaccggtacgggggcaggaccggtcacttcccggttttggagaaaaaagcaatcaggtccatcagctgcgaggaatgcttgcttgcccgggaaggcaaccctgactcagaaggagggatattcctccacgttgtcggccaccacgttctcgcaggcgatgacgtggtcctgttccaccggcttgccgtccagatagtccaccatatcctggatggcggtctggatcatggccgggctgtaggtgaccgagcagacgccgctgaaccgggacgcgatgtcggcatagctttcgccgcggatgacatcgtacatctcgcccaggccgccgcagccggtgatggcgggcgcgttggccaggaaggcctccttggtggcctcgtcaatgccgccgcctgccagggcctcaaagacgcccatggacagctcgtcgtcctcggcgtagatccagcggatatcggtgttggcgctgtcgcccatgagggactcaaagctttccttggtggtggaacggctccagttcatggcgccggaataggtgatggaagccaggtcctcctcggtccactggagggccgggtcgatggcagcaccgtcaaattccagcttgccggtcaggtagtcggtaaagccctggttgcgcagggtggtcaccgaggaggtgtctccctcgtagacatagaccttgtcgccgggctgcatgccgagggagacaaagtaggccgcgctgcccgcgccgatgccggtgttatcacccttgacgttggacactgcggaggcggaaacactgtcgatgatgcggtcaaaggccacatagggcacttcggcgtcgatgacctgctggatggcggactggacggtatcgtccatgggctggatgacgatagcgatgttctcggtgccctgggccaggatgtcctccaccttggtgatctgctccgaagcggaagcgctggtgatgacctcggcggtgtaggggccggcggcgttcagttccgccaccttctctttggcgaaggtagcgacggaaccggtccagccgtggtcctcggcggcggtgagcacgtagatatgggtggcggaagcattttccgccgtggcggtggattccgacgtgctgcccgaagcagcggagtcggccccgccgcaggcggcgaggctgagggtgagggctgccgcgctgagggcggccagcaaacgagttaacaaattcatagcgtacactctccttagtcacaaattttatcagcaaatagttgtggagggacagtagcaaaagccgggccacagaggtccggcttttgccgatttttggggcttatccctgtggggattagatttaaccgactgacgcccccgcttcagcaccaatccttgtttaagcttctacttgacgtcttgcttccaattctttccggatattttcgctatcggtatcgctcatatcccagaacaggcaggtcagtgcccccaggaagaacaaaacagccggaagcaagttgaccgtcagattaataccctgcagcgcttctgctgtctgctgcgcatttgcctggtagccaaagattcccaacagaagtacacctactgcaccgccaacagcattgcccgctttggtcgccaaagtgaacatcgcataagaactaccatcggttcgaacgccgcttttaagttcctgataatcaatggcatcagaggtcatggaaagcgtaatggggaaggcaacattgaaagcaccataaataatgtgaccaacaactaccataaccaaattatcaaacggagccagatacacaatcagaagaccaacgccctgcatagccaaaccaaccatcagagtcttcttttttccaaaccgtttaacaagcggagcgacaaagaaagaagacactgtaccgccaatggcaggaatcgtcataataatggcaattaaagaaaacgcgcccagacaataaatgacataataagtggtaatagcgatgcgccccataaaagcagtcatctggaaaagcacaatcacaaaaaccaataccagatacttgttgctgacaatatttttgacagtaaccatcagcggaattttattttctccattaccggagtgaacaacttctttgcatcccaaaaagacacagaagaacagcggcaccgaaataacacaataaatcagtgcagtcataaagtaaccacgaccagtagcgacttcggaaccattggagaacgcaagcataattccgctggagcagacattaatcaaaatcatacccacgcccatacccacagaacggcaggcgttgatttgattacgttcattggcgtccgtagtcataacacctgccaacgctccatacggaatattgaccaaggtgtagagcatacccgcaataatataagtaacagatgcccaaacaattcctgcagttccgttaccaaacggagcggtaaacgtcaagataatggctaatgccaaaaagggactaccaaatgcaatataaggccgaaaacgtccaaaacggctttttgtacgctccgcaattgcgcccatcatagggtcattgaccgcatcccatactcgggcacacagcataattgccgataccaccgccggagcaagacctacgatatcagtgtaaaagatagtcagataggatcccacaaaagtccacccaaactgactagccaagtcaccgattccgtagcatatcatgctcaattttgaaactttcttttctttcatgatttttctcctttcttatttggatcagctggaaactcctcacaaacattcatgcgctttccgcttcgttgtcatcaagtatataggaatccatcaacatattctttcgaaaagaagttcatgttttttctatttttttatatctaagttcctatatttatcacgaacagaaaatacaaaccacaaaaaacgccatcatttttggctttttgtaccaagtatataaccgagcgcatttctttttgtttatttcgaccatcatttttgcttcatcaaaaaaggcaacgcctcaatatggcgttgccttttatctttctaccccaatgccgctcgccgctactcaatattgatagctgatataaatattttggatttcttgtggcagcaatttagtttccagtattagttccccattttcaacggtaatgggtacaatacgcatatggctcgcacttacacgtcgtaaatactttaattcggttagcattaaatctttttctttgttcaggcacccccattcatcctgtacacttccattattgatatttatatatcgaatctttgccttatatatgccattttttacattgaggattctaaacttcagtgtctgcgcctcataatcttcaaataaattatgcaattccaaacctgctagttcatcttcttcacgaaggaagcattgataactataatgtttgtaattatggcaagcaatggcgtattcatcccttccactgctcgtcactacgctatatcgatctttgccgagcaaatagggcaacaagtgattcataaactcaattccatagaaggctggctttcgtattccatccgctgtcagtaacccgcagcatccgttcaataacaggttcgaatcataatattcccctaaaagatctgaaccggaccaatagataatcatatcagcagcattcaagcaatcaattaaatttttcatgatatatgcacccttaaaacaactatcgttaaggatgtttctttctgaaagcgtactgctccactcactaatatgaagaggaatccctgccattccgcattcttcttgcagttggcgaacctcctgaatctgattcaacaggtattcctgatttgcagaatgttttaccttacgaataccattctgatttaccaccatatagggataggaataaatcgatagaaaatccggtcgtatttccctgttattccaaatgcgtaaaatctcgcgcaattctgtgctgcaacattgctgatcaaaaccacctccgccgacttgtatatctaatgagatacgtttaatttcacgatatccaatatcaaaaatctcaaaatacctatccagaatttccgctgcagaaagttcctcgtctggatgaaccagagttgcatctcctttccacaattcaaaataccaactcttcatttcttccacaccgtaacggttagccagatgagaaatcagtctctgaattgttttttgataggctgcactgctatgaaatatattttcttgattatttacaaataaaattgtatccgcgtttttatgaatagtttggggcttaaaacccaagtcaatatacggtttaatcccattctgaatcaaaaaatcaagacttctgtcaacgtgggcaaatttgagttcttcatttccttcaggatcattctgatacatccgactttggaaaatattccaaaaccggacatattgaattccaagtttttctttcaagtaaaggatgtgttcctgcatacgagaatgcagcaaattatctaaatctccaatattgatggttttttgccatatttttccatattcctctctaatcagggaatcaacttgcaaacttcgattttttgagctttccagctgctcctgaaaagagtttttcatatgaagataatcaattatcctcttctgatccacatctttagtcttatcatgttcttccttcttttgcgcatgcatttgtttcctatacgccgaaggggtcatatggtatttatctcgaaacagtttattaaatgccgccgaattagggaagccgttatccattgtaacttttacaatagtcttatttgtataaagtaaatcttctaccgcatggtgcaaacgaatggaattaagatactctacaaacccgacgccaaactggtgcttgatatatttagacagataaccgctagtcagaaagagtttatctgccaaatcagtcaagctaatttgactttggtaattagcttctacataattctgaatttcataaatccgtggacgcttttctttacttctttttcgggaatagcgttcagtgctaacaagaaagtgaaccaccaatagatgtatcagttgataggccaaactattaacataaatctttgtttcccttcccttatcaaaatattgattcaaaattgtatccaacaggcggcgcatcatttcatgttgtgctgttttttcctgctgcgtagtacaccaaaatgtgatatggctagtctcaagcagttccacaagttgatgataatttatggtaaatctcgctgccaaaaaatctttttctgcttttgatgcgtgggaaaaattggaatttataacaacaaaatcaccagcatgcatctcaaaccattcttcttctatctgctgggaaagagttccttccaaaacataaacaatttcaacatcctgatgaaagtggcttttaattgttcgatcttcaaaaaaaagaaacgacatgatctcggtattttcactcataccaagtcctcctaccataaggtattcattccatccaagcacctaagccaacatggcattttccctaatttttgcgtttttttctgcgcagaatcagtcatattatattatacaaaagaaaactttcaatggcaagcaaccccatacaaacacaataaaactctgccgatttataaatcggcagagcctacaatcgaatctatttcggttatcttagatgtcacttattagaatccagcaaatcttgtgatagcctcacacaaggagcctcaattgcaagcgatgtaaaatagcctaccaaatgcaacacaggatatgtcgttatccaaacttgcaccacccgcggtgtaacgcctacatgtatcaaagcaatggtaaaactgacgattgtcacaaagatagcattaaccacaaacaaacgcacagctttatgagctattggggctctcttaataataatcttatctgcgactatattacctattgcatcaaccggaataattagtcctgcaatatagttaatacagaatgcctgaaacattcccaccaaataactagttgcctcttgaaaaccgcccgccagaatagtagctgtggtattgattacaaacgccagaattaaatcctgtaagagaatttgaagttccacctgtctttttgtcattttcctgttcactccgctcgtttttaatcagtataaatgatttatatagtagaatcattcgatttttccccctggactatatgaaatttaatcctttcagcaatttatcaagccaaaaaatccacaaaaacaggtatatgttctttcttatatatttcaattttgcttctctatataataagccaaaaactatagctcttttttagctttaatgcgtgctgtttttgtggggcagaaaatgtagtcccttgtttttagattaattttgcacaaaaaacgaaaagattttgtgaagaacagaaaatataataaagacaaagaaatcagaaattcagtgacacaaaatagtatcttgataaaaggagaatagtatgaaatacgatgtttgtactgatgccgtctttaccggtctggacatctgcgaggcaatgcagcggatgcatgatattggcatgaattcttatgagttttggctctggtgggagaaagatttggacgctgtagttgcacagcaaaaaaagcttggcatgaattgtgttgctatttgtgccaaattcactaccagtactggtgatcctaatggtcaggcccagtatcttgaagacttccgtcaaagcgtagccgctgcagaaaagctcggctgcaagaacctgattgtccaagccggttgggaggttccggaggtttcccacgaagcgcaccgcaaggcatttttggaaacagttaagaaggctgcccctatcgctgctgaaaaggggatgactctgattatcgagcccttgaacatcaaggtcgaccatgcaggttaccatctctgggataccgaggaatcttttgcggtagtggatcaaatcaatgagcccaatgttaagattctgtttgatatctaccatcagcagattaccaacggttttattatcgaaagcctaaaaaagcacttggacaaagttggacacatccatgtagccggctgtcctggtcgccacgaaatcaccactggcgaactggattatgaacacatcttccaggcgctgaaagaaatggactaccaggagtatgtgggtctggaatacttcaccgatcgtccgattgaagaaggtctgaaagaagcacagaaactgttcgtatactaagtaattccaattctataaggaggtttcccctatgaaagagattctgaatgttgcattgattggctgtggctggattggcgaagacaagcatgttccttctattctggccaccccggatgtcaagctggttgccttgtgcgataccaaggttgaaaaagcagaacgtttcgtggaactgtttcacctcaccgatgtgaaggtctattccgatgcatccgaaatgcttaaggatcccgacatcgacatcgtgcatattgccacccccaaccccactcactgcgccctgacttgtgctgctttggaagctggcaagcacgtcctgtgcgaaaagcccatggcttgcactaaagccgaatgcgaaaagatgattgccacggcgaaaaaagcaaaccgtaaactgaccatcgggttccagtggagataccgccctgaagccttgaaggtcaaagaactgtgtgaccaggacgtcctgggcgatatttactatgccaaagccaatgctacccgctacgcaggtgtgcctgcttggggcgaatatctcaacggcggcaacggcggtggtatcttcatcgacggtgttcctcatgccttggatcttaccctgtgggccatgaacaactacgaggtacatagcgttaaagccaacatctacgataagatgaagagcaatcccgaaggctgcatctggggcggctgggacgtcaatgacttcaaagttgaagacagcggctttgccattgtaaccatgaagaatggtgccactatctatatcgaggcttcttggcgtctgaatatgctgggtgaagacatgaagaccaccctgtgcggcaccaaggcgggattggatatgtccggtgagcatcaggttcgcgtcaatggcatggcttttggcaaaccctatgtccagtgcatcgacaccagcgatcccatgccgcctttctccatcaaatccagagcccctggtttggaggaaattcgccgctttgtggatgccatccgcaatgataccgatgtctttatcaagccggaacaggccatggtggtcactcagatcattgaggctgtttatcagtcggccaagactggcaaagaagttgtcttcgactaaaattctttttcctggcatttctcttagtggaaacacaaagttgttttctcccccatacaaatgcccctgctggaaggcgggggcatttgatatataagtacaaataatttagaaaataaagaaaaggagtatatgcatgaaatcctatgcatttggagtagatttgggcggaaccactattaaactaggacttttccgtgttgatggaactttattggataaatgggaaattccaacccgcccccaacaacacggcgaaaatctgctgcctgacattgcccttgctattttaggcaagctggcagaaaaagctattcctatcgaagatgtagaaggtgttggcatgggtgttcccggtgcagtattgcgcaattgttttgtcaagccatgcgtaaatcttgaccaatggggtggattcgatgtcgccgaaaaattatccgcattgtgcaaactacctgtaaaaatcgtgaatgatgctaatgcagccgctttgggcgaaatgtggcaaggtagcgcacaaggctgccacaatctagtatttgtgacactcggtaccggtgttggcggcggtattgtagtggatgacaagctgttgtccggggttcatggtgctggtggagagatcggacatatcaaagtcaagagcaacgaatctcgtatctgtggatgtggtaaaagtggctgtctggaacagtatgcctctgcaacgggattagttgcaagtgctcagaaattcttggatagcacgcacgtggtcactcgtctgcgggactacgatcccttgacctgcaaagatatttttgattgcgcaaaacaaggagatcaaccagcactacaattggtagacgaaatgtgccgtttgttagggaaagcactggcttgtgtttcttgtgtatgtgaccctgatgtgatcgtgatcggcggtggtgtagcacgtgcaggcgatttgttgctaactcacacacaagagtggttccaaaagttcgcctttcccgcagcggaatccaccgattttgttctagcttctctaggcaatgatgctggtatctacggtgctgtacagatgattctaagcaaccaataaaaaacgttgaaaggcccccagcgcgtttattctgcgctgagggccttcaacattttctctagcttgaaatgtcttttctacgaagtactttccaacaaatagcagccgcaactgctatcaagatacacgcaacacacaatcgcttccgtggggaatttcccaatgtaatctcagacaaagcactcaacaagagcggggagcttgccgcaaaaaggttcacaaccgagagataccctgcaattattttcgatcgttgctcttctacacaacgacgagatattaaccatgtaccggaagcattgatcatagcgaaggccgctccaatcagtgcgcctcctgtaattattcctgatatcataggcaacgaaatcatcaaaagaaatcccgttgcgctgattactaatgcaaccgattgaatctgctccccgatgcgtcgttctagttttccaaaaacaattccgcctataatcccaccaaccgcattgctgccagtaactagactcgagaccactgcaccccccaaggccaattctttaatataaagcgatgaatttgtgtgaaaagcattttgtgctgtaaaatatagcgcgccaatgaaaaagagcgcaggaagtcccccagaagcacttggaatttgttgatgagcttcaatcaaagtgttttctttttttggttcatgcggtaaccaacgcaaagaaataaccaggaccggtatcatcatcaaaaacgcaaggtatggagcaaaccatgagaattgacttaattgtccgcccaaaaagctgaaaactagcgatcccacattgacacacgttgcattataccccagcattctactacgctccgaaccactatatatactacaaatcatactatttgtagcctgcatcattaaacccaaccccgcaccgatgaccgcgctggaaaaaagcaaccctactatagacgagtgaataaaaaacggaaacactccaccaacaagttgtaaggaagtgccaatcacaatcaacctttttcctcccaccctcctttcactccacccagccaccagagaaaataccatcaacgtaaaagagggcagggtaataattagctggcttaatattagcggaacttgcggaaaagctgccgtaatatcagctagcgccggagtaatgcacatgtaaccaagagttgaggaacatgccaccaatataccaattttgatttttgtctcttgtttcatcatttctcccaaactacaacatcgcagtgcgcccaacagcatccctacgggaagttttagcgcactgcgatgacttttacatatttttacagcttgacttcttcgccagtctcagcagaacggtaaatagcctccagaatctgggtaaccacaaaggcttgctccggcttgaccagcggctcagtatcgttcaaaatcgcctgcaaccactgacgagactcaatggtaccgggttcaccgttggtgccatcaaagtaggccacattaccggcaggagagattttttcctcagtaagttcaccacaatgaccgcggttgataatgagctggtcctcgggatagctcataccagacaggacctctgcgccagccttggtaccacagagcgtggtggaagcttctttagattcccgcacattcaaggcccaacttgcttccaagttgatgaccgaaccatcctccatcttgatgaagcccatagcagaatcctccacctcataggtttcgggatcccaaggaccaaactcgttgccttcggtagcctgaggcagatggcccagcttgtagaacacctgaccgctaaccgaaacaggcttgtaattatccatacaccagagggtgatatccagggcatgggtgccgatgtcgatcagcggaccaccgccctgaagggccttgttggggaacacaccccaggtaggcacagcacgacggcgcacggcatgagccttaccgtaataaatctcacccagctcaccagcatcgcagcactttttcagcatctgcacttcatggcggaagcggttctggtaaccgatggtaaactttttaccggactttttccaagcgtccagcatcttgcgtgcatcagcagtgttgtgggccatgggtttctcacacagaacattcttgccagcctcaaaagcagccaccgtcacagggcaatgcgccacgttgggagtgcaaacatgtaccacatcgatatccttgtccttgaacatctcattgtagtcgctgtatacctttgcgccctcgacaccatattcttctgccgctttctgggcacgctccacctgaatatcgcagaatgcgaccatgtcgcacaaatctgcgttcgccttgagggcaggcatgtgtttgttattggcaatgccaccgcagccaacaatggcaacctgcagtttcccgtttttcatatgtaaaacctcctgtatgttaatagggctttagcccatcttgtccagaatgttctggttcatcttgacgtagtggtccaactgctccacgcaacttacatcagaatagaagtgatggccttcgaactcgctagcaatgtatcccttgtaaccgtacttaaccaaggcagggataatttcttcgtagggaatgcagggatcatgctggtcattatccagatagtagaacttaccatggacatagaaaatgcagtccacaacatccttgagttgctcgattcgggccggatggttgaacttgccaaacatctcctcggcatagtgcttttccacctcgttgtagtcaccagcctcaatcttggccatatctccaccctcggcgtgaatcttgacgatttcatccagcttatccggacggcaaccgaattcctctgcctgacgtaaatacagcttgtgaggcatatactggaaaatagaaaagtctggcacaaaacccaaatatcctttgccctcgcctttcatgatggaaaagtattccttccacaccggcacatcggggtgatggggccagtgcatttcgatggtgagtttcatattcagggctttgcagtaaggaatcatcttgcggaaaatggccggcgagattgcatgctgtgtacgaaccatggggaacccggcctttttagcgtagatcaaatcgtttaccgtatactggataatctcggcttcggtcatatcccgatctgtacgggtccccatatcgatgtaggccgaccagcataccggctccagctcgtatttttccaacaggccacggaaatggaacagccattcatcagtggggaaaggatagttttccaccatctgggcagcaacgatttccacgcccttgtaacccatttcatggaccgctttcaggcaaccttctaaatccagtacaccatggatgtactcagtagaaaggctgtaaagagaaacgccaattttgatatcctgattcatcgtttatcctcctccctatttattcgcattgcagcactttggtgcggtcactgtccagtgtgagatactgtccgaaataacctgtgtacggaacacgatgccgcatgtacacattcacctcgtgatcacccttaggcagaccgctaggctgcataactctgactgtagcagccttgcgcacatcccaatattcgcggaaaaggtccggcagctcatccatagtgaactgcttcccgttcaggcacaggtacaccaacgtactgtccaactcgttgccgtccactttaaacttcagcgcctcgatacagctgagaaagcaaccgcgataagagggatacttgatatcaaattcataccccacggtaacaccagctaccactacattacggatcttatcgccactgaataagatttcattatatgccacaaaatccattaatcttcactccttctcctgtttgtccagaacttcctgcttgtatagcggcggcaacagatcccgcaggcaagccatttccagtacgttgtgctcaaagatacctttcaacatgctctccgacacacgagtacccggggccagcattttaactagccccccgcccaacacttgatatccaaaccaaaagcgactacgcatggtcagaccgtcttcttcctggtacataaagtgacagaccacacctgcagtcggaggcacctgctctcctgcgccataggttttggacaacgcgttgcctccatcagtcatgacacagttactctttttcatttcctccagattcaaccccagcagtgaaggatcctgacgtacactacctccgaaatagatttcttccaaattcccaccaatgtcttccgatgtgtaggtaaagaaagcccccacatgtttacccgggcaccaaatcttgtagcgggtctcgctgtcctccttagtccaccagtcattccagaaattgtacatgtccatggtaattccaggccaccggtgcaggaccgcaacatagcctgtcccgtcgggcaaaacgcaatagccactttccgctttaatccgttccggatgcaacatatcgctgatattttcagccaaaatcgcatcctcagggcgcaaactactgccttgttccagcactttctgattccagggctcaaattccggcgccggtcggtaataaaagtgtgcatagggtgctttttcctgttccggggtcaattttgccatttcagcccatgacttcatgatgcatacctcccaatctattactcaaagtctacagagcgccccaatttagccgacttccaacaggcttccataacagccaaggtgcggcgagtttcttctggtttaaccagaaaatcctccttgccatccagcgcccgcagataattttcaaagtagttacgatgttcagtgttcacttccggcaacggactagtctgaattagtccttcagcaggagtaccgaaactgcgggtaggcccctctgctcccagaggtttgcttccaggcacctgagttagcaaatacttagtggtcacacatttgcccacagcatcaaatccatcacaataggcgctacctttgttcccgccaataaaccagtgccgagcaaaccagcccggttggtccgacaggaaatacgtacccagttcaatttcagcgttcacgccattctcaaaatggaattggattttgaaaaagtcatcacactctttcataattacatttcgcacatctgcgaaaattgttttaagttttacgccctgcatcatccacaggatttggtcgatgagatgaacgccccagtcatataacatacctccaccttctgccttgaagatatgccaatcatgcatgttgccattataaccatacaggctagactgaatcgtgtaaacatcgccgactgctttttgatcgtagattgccttgatgcttcgaaagtctttgtcgaatcggcgctgctgatgcacagtgaagcggacattgttttcttcaacaacctgcaacattttatccagttcgcgcacactcattgccactggcttttcacagatgatatctttatgcgctctggcacatttgcaaaccacatcaaaatgctgattattattgcagcagacaatcactgtgtcaaaatttcccttggcaagcatcgtgtctacgtcagtgaaggtctgcacaccttcctcgataccggtgagcatttcagggtttcgatcgcatatcgccgttaccgtaatctcgtcaaaggtcttcatcatggcgtagtgctcatgccccataaaaccgaatcccaccaggcccagtttaatcgttgccatatctgttgctccctctgctctgacgcttgttttcaaatcacaaactgctccatatagcgcttgctcaggcgcaggctgtccagaactttctcctggctgccctcaaaggccttgtcctccacctcgatgcaggtgtagccgtcgtagccgatatcggtgagggcgcttacgtatttgccccagtccacatcgcccagacccggcagtttgggggacatgaagtccagcggataggccatgatgcccacctgatccagccggtcgggatagagcttgatgtccttgtagtggacatggaagatcttatccttgaactcatagatgggtttgatatagtcgatcatctgccacacaaagtgggagggatcgtagttgatgccgagattttggctgggcagaatttcaaagacctttttccagatggccggggtggtcatgaggttctggccgccgggccactggtcgggaccaaagagcatggggcagttttcaatggcaaccttgacgccctgttcctcggcaagggcgatgatggaaggccagacttccttgaccagctcgaggttttcctccacggtcttggtctggtcgcggccgatgaaggtggtgaccatgttcacgcccagcttggcggaagccttgataagcgccttcagatgttccacggcggcggtgcgcttttcgaggtcggcgtccatggtgttggggtagtaggccaggctggagatctcgacgcctttttcggcggcgtaatccagaatatgtttagcataggcgtcatcggtgagcactcgctcagcgtcgatatggctgacaccggcgtagcggcgctcggccttgccctggggccagcaggcaacctccacacactggaagcccagcgccgcggcggtgtccatcatctgctcatagttgctttgatcaagaatcgcagaaacaaatcccagtttcataaaaatacgctcctttatgtattgtaatatttacctattccacttttgtctatttttttcctttttcttctcttatcttgattacaagtataataaatgtttcccttcaattcattcagaatcaagatggaattccatctattttttattctagaaaacagtcataaataaatttcggattactccacacccaaaatgaagtagttgtttttttccttttgttcaatcattataaatgaaccacggctttttaatgcacattgtacacaatattttccaaagatcatcatactccattactctagactcttctcttccctgtctttaatttactcttcttttatattcctgaagccatctgcattacttttgtttccattcgaaatgtagatggttaccagttgctcttcctgtatgtcccacataggcaatcagctgcccggtctgcacctgctgccccactgtaacacagatactggagcaatgggcatacagggtcgtgagtcctcctccgtggtcgattttgacatagtacccgtaactgccgccccaactatcggtagcgttggcaatggtcacggtaccgtccgcagcagctaaaattggggtaccctcgggagccgcgatatcggtaccgctatggtaactgatttcacctgtaatagggtcggtgcggtagccttgcggcgaggtaatcgtacccgctaccggcaacggccaatgtagcacgccatccgcgaaaactgtatccataccaggagtcatgacatccccgcttccctgcacaaaaccacccagcagttcaccccaaagagttgcggtatcttcattggaaagcagtgtcagatattcattctgtctatctgtgaagtgataggtttcccgcatttcttccggggtgtggtgggtcagttcgatgatcaacactgtttctgtaatcatcacggtttccgattcgccatcctcattgctttgctccagctcacgggtttgtgtttcggtgcgccagtccaattcattcatatcccacagcaccgtgcgcagacgctccacattatcctcatccaggtaggcaacagcggaaccgttggcatcacccgccgtttgagaagcaaagaccgccaagacatcctgccacgcgatagcataactgccatcgttggactcgatttcctggcggtcatattctgtgctgttttcaattccttccagttggtgccgatattcttcggtaagcagttccacagcttcctgtacactgatggcgttttcattgggtgtttctgccgcgaagaaaatgccgtaggcggagcctaccaccagcgcgatcaggcaaatcaaaagcacgataaacaccgcaacccagcccccgacgatcaaagccgctgcgaggctctgcagggcagccagcagatgccggatggccgaactcagaactgtcgcggccttttggactgtttccacgcccttccgggccgtttgtctggcacagcgcagcatcacctgtgtgcgctgcgtcgcttgctgggccagcttctcttgccgcaccgtgttggctacggtgcgtagttgcttttgatcccggtccacaccgcgcagcccccgggcaacattcttggcctgtcgctgccgttcctggaaaatccggctttgcctctgtgctgcacggcgtttctgttcctgccttgcagacgttttcaggtcttgatcggccgcgtctgggtgcagcgagtgtccttcctgtatttcctcccgtggcaggcaccggttcggttcgcgttcacgggtaagatgtctgcgggcggtattcccggctttccccagagcaaaggccgcgccatcttctagcagcgttcccccctgccggatgccttgttcctccatctcctgtgcggaagcatagcttccttccgggttcgttttcgtggccgacaatacccgctccttacttttcagccacgcctgtcgggccatcgttttggggagcttgttaaccagattctctctggtcaaatccccacttggtttttgcttaatttccacacgcttgttttctttcacggaatcaccttctttagtaaacgttctataaacacaagtgaggagctgccaacccagcagctcctcacttctatctacatagcttacgtgatgtaagattcataccctaacattgctttcacactttcgcctccacaaactatcttcctttctcaaaccacaatttactttcctggtcaccgatcacacacagataccggtctcccacaccaccaacctcggcggcacgacggcttacgtccttgattttatcaatcttatagatctgttccggaccaaatagaatcgccaatggacgtaatcgcccatcctctttggactggtcatgcagataccattcgttcatgatattgagaaagggagcaacctcgccgctgtcctgttcctcgttgtcaatgttattggcgacagcaacaaaatgaaccccattctaccggaacattgcctcggtgtaaaagccagtttgcaggtagtttctgccgatccgactaagatccttacacagcaggtgggccaccttgcccgcctcgatgtccgccacaaggctcttccaagcgagacggtcaaagttgtcgccgcccccatcgtctgtgtagtggacgatattggtgtagtcccactgtgctgcatagctttcgagataacgtttctgattcagaatggagttcgagtcgcccgtgaggtcatcgtcacgggacaggcgctcatagagcgcagtaattttttcttccgtctgtctgtttgccatatcaggcgctcttttcagacggacggctcatttgtggcaattccgttataccacattcctgttggtttgccagtccgtcgttgcgaatcaaccgcagaattttatcttccatagttttctcggcggtttcgctgaggtagacacgaactttataggtggccttgccaatgcgccgggtcagaaacacggcgtttttatctgccatagaacctctctttcttgcgctttcagcgcatccggtgcatactattgttatggttccgttacctataacctgcgattatgtcacttttttgtgtccagcctgaacatggcacctcccttctacggaaccattttaaaaaatcacaaaatattttttgaaagagggggggcatggtgtatctgtctgatgacgagcttctgaataccgagggtagcttcaccggatgggacgatggaacaggcactgaagcggcggaggaaacactggaacaggcgcagaaaaaagaaaaaccgcccctgataattgggacgattaaggagaaagggcgtgtatgatgaaaaattagtttgaacagtcccgttccaattgggtgcggtacaatcactatgagctgaaaacagcggaagatggcaagcggtacatcactcccggcaaaaacacaaagccgaatgtctacaatccgctgaaataggtcccgaacattgtgctagatgcgctgaatgtgaggatgctgatgacagggcgcaagccggaatcagaagtggacaaggcgataatggagtttatcacccggtacggcctgctgggtctgatgaccgccctgctcaccacgccgtcctttatggactatgaggcagtgtacttgccgaaaaaccacttcattgagaaagaatcccatggcgacagacaaatacctgtccctgtttcatccttttgaccagctggacttggtgaagaaaggcatagaatccacgtggaatttgtcctggggccagacgatggttgccctgaccataactttcatggacgagtcgatggcgaagaacatgaacttccagcgggaatatgcggaaccctacgactgggttgcccagcagttcaaggattgggcctttacgctgaccaccgccattttgtactataatgactatgattccatcgacgaggacgcacggggactgtaccgcaaggccatagctgcgttcggcggaatctcccccagctaccgcattgagctgctggataagccctcaatttactgggactttcactccctgctgttgggtatccagatgatgttcagctttatgctggtggacggtgaccagcccctgcgcctgtgcaagcactgccagaaggcgttccttggcagccggaccaacgccgccttttgcagcccgcagtgcaagaaccagtacaatgtctacaagagccggggaaagagccggacggatgaagatgacgaggaatgagtgaggaacaggggctgcccccgtatgaaaccagaggaattctcttttacaagaccgaaaacagagaggtacgggtggaaatcctgctctttcaggaaaatctctgattaatgtagataaaatgggtggagctgcatatttacaatatcggaagatacctgaaatcttctggcaacataacaaccgtaaggattcactcttttgcataaagagatggttcctactaacgcagggaccatctccgataaaatattcttgctttttctgaacacctaacaggggggtacattagattcccacagttggacatgatcttttgcaaatatgcctttctggcaccaattatcgatgaaagtgagggttctgcctatgaaacggatttatgaccaaacagttctatctaaactgtggcaaaaagcacatcttgacactatatttgatcccaacaagattggcttctttggttgtgaatataaaaaaggagaatacctttgtcaaccttgcgaggaagagaaatatatacaaattgtagtagatggacaagtcagtatttactacatccgggatgatggaacaaaatattctctgacccaagagaacggtgttcttctattgggagatatagaattttatcaaccatcaccagctctgttttttgtagaggctctgaccgaaacggtaagtattgccattcctttggcgcaataccgggacacattaaaaaatgatgttcgtttccttaatttcttagtgggcgtgttatctcaaaagctgtccacaatcgccttcgcctatgcggccaccagctcactgacagatcgagtgctgaatcacctgaaataccgttgcgaaaatggacttctgtacggactggagaaaaatgcgtttcagctccgttgcagcagccgtcagttactacgagtcatgaccaatctagaacagcagggcattgtgaaaaaatgcgggaaaggcaaatatatattggtaaagtagtgctcattttatgcctgctctttttggagaaatggataaaattggtgataaaacagaactccggccagaattacggtaacaacatcggatactgcctgtgcagccagaacgccatcatatccccaagcctgagcaagcaggaagatggcgcccacaaacacgacaccctgccgtgcaagggaaagcaacaatgcaggcaaggcctttccagcagactgaaacagagccgtgaccagcaaaatcaaaccgaccaacaccatagacaccacctgtagccgcaacatgggggttgccgtttcaataaacgcaggatctggcataaaaaccgacagcaacttctctgccaaaaggaaaaccagcaaagataatccgattgccgcgccgcagatgactgcggtagcaaactgtatggtacggcgcagtcgttctctattttgggaaccaagatagtatccaaagagaggctgaccgccaacggtgaggccagtaataatcaacaatacgatcatactaacctttatggcaattcccatagctgcgattttatcgtttccgtacgatagtagggcttgattcagaaaaatcataccaaaactctgcataatgttggtgacagcggctgccagtccgacagacaaaatttgccattgaaaagcggcggatatactaatttctttgagagaaacggatagacaggtgcttttctttttgacgatataaagactatacagaatagtaaaaacatatccgattacagtagcaattgctgcgcctgccgcccctaatcccacaacagaaatcagaatcggatccagaataatattgaccactgcgccgccgatcatactgatcatagattcttttgcccagccctctgtccgtaagagattgatgtgaacaaaggaacccaccacgaagggagcacctgccattagccagatatagtaatcgcgggcataggagtaggtttccggatcggtgcctaaaagagacaacatgggctgctttgcaatcaacatgataacaccaatcacgagtccgacgattagagccaaatagaagcaccatgaactgacatgtcgaccttcctccagattattttgcccaagcagtcgggccagcaaggaggaaccgccctgcccaaagatattccccagcgccatgaggaagataaatacaggggcccccagggacacgccagcgaccaacgcagtgttgttagtggctgcaacaaaataggtatccgtcagattgtacaccagcgtaatgaccagggaaaataccatgggaatggccagatttaagtaaagttttgaaattggttccgtatcgttcctttgtaggttcatcgaattaaaatgctccttttctaaaaatattatgataataaaattataacaagatattgagtcaaagacccggacacgtgtcgtgtttagagaaatttattatacggcattcaatatatgaataaatccgcccaacaacgacaagtccacctgaactgaggaattacgtttcaggcggactataggtttttgctacttcttatttagtagatgctcatgggcttcctgctggacgatcagccccgccgaaaaaccatacttgaaatggctctcactttcctcgcacggagcgatagcgttctgtgcccggagtttttctaccaacgcgtaggcctctttgctgagccgctgagatagctgctccatcaacgccgcacagatttggatcgtcttgcggtgttccggggacgtgggcactactgtttcacagggataaccccccgttatacatggcttccaaaatcattgcgtttcctccctcaacagtagaccaactccgccaggacgatttactcggccctgttgtggatggagttcatgaagcgcccccatgccgtctggtcggcagctttcagggttcctgtgacgccctctcgttgcatcatggctttttcgataatttccagccgctcccggcaggcggtatcgatttccttcaaatggggaaacagcttttcagtgacaatgagattggtatacagaatgggccggtgttcttttaagtaggcacggcgcaaccggccatatttcccaacaaggtactctttggtgtccgctaacacaaggtcgggaatgagatagtcgccgcatttggtgtaagtcagttccatgcaaggctcctttcgagggaatgtggttgatagttacggtaggtttgagggcatttttcccccccttagtcgcccccttgatccgttcttgcggcagattgcatctgccctttggttttcaaccacgcctgacgcgccatgttttttggcaatcgttggatggagcgatcttccgacaatcgtccggctgctttttgtttgatctgcttatgctgtttttctttcataaaatcacctgcctactcgcaataagaaaaggccattgcatggatccgcaatggcctttcactttatacttttctacttacatcatttctattttcagcttccgtataggcaaagacctatttggtctccagcttgaatttgtcgcagagggtgtctatgacttcctgctcgatggcgcggctcagttccatccgcactgggcaaagtttgcggcgcagtttgatgacttcggccatgtgatcccggtagttgagttcctcgtcatagatgctgtcggcgtcaatgtcggcgttgcgggtcaggcgggctagcgccttgccggcgatccggtacttgggaaagagcagtggcaggcagtgcagaatcagctcttccgccaggatgtagcaaccggttcgctccggcacggctattagccgcgggaacaacccgctggcacaaggaattattccgatcttcctcttttcagcctttgtgctcagcaccgcgatggcatagatctccttgttggccaaaaaggggaaggactgctttttacccacaataaaagtggagagcagtggcatgaaatcccgccgaaacatctcttccagatattgggcagcctccggcttgatgctgtggaaatccaccagggtgatgccctgctcggccaacaggcccatcaggttggcgtaggcagcgtcccggcggtggcagagctgccgtacccgttccagcgctgtgtcgatctgctcaccgggggtcatattggtcttattttccctgctgtccttgtccagtagcatctggtcgtgaagacttccgatccgcaccatgaaaaactcatccaggttactctggaagatggaaaggaaagagagccgctcgcacagcggcaaccgtgtatcctcagcctcttccagcacccgctcgttgaatcgcaaccaggaaagctcccggttttcaaaacatgtgtattccattagttcctcctgcccctgccgggggcttgcagccgatccggccggcccgtttctgatgatgctcaatctttattagcataccgcgtttcggtcaccgttatctaccatggttttacaaagaattgtcaaattctttgtaaacacccgtcgaagaaaggagtcatgagaagtatccttaaaacagttccctcttgtccggcatttctttttctaaataagtaccaaccatccactttcacataaatccagagggatagcactatttatacagtcgatttttactttccattaacgacacgccaaagaagcggttgcccacacataggcagccagcaagagcaaaaacaatatcaatggtagaacatcgggaaggatacgttcaccaatttccgtccttctttatgccgttttcgaatgtactgttcttcttctcagtctgcaaccttaaagatacgcaactcctctttttattttccatgccagcaaacctccacttctgtttggatataccgcgccaacggcgtatctctcggctgttctcactccatcccgttctgggcacgctccacgatctctcctacgccggaaagcaccagactggggcggtaggcataggttttgagggtctccatggtggacaccccggacagcaccagcacggtggacatgccgctttccatacctgagatcacatcggtgtccatgcgatcccccaccatcactgcgtccccggaatggcagttgagcagccgcaggccggtgcgcatcattagaggattgggtttgccgcagaaataggcctgctggccggtggccatttcgatgggggcgatcagcgctcggcaggcgggggcgatgccgttctcgatggggccagacacatcggaattggccccgatgagctttgccccacgcagcaccagattggtggctttggtcagagtatctagggaataggctcggccttcgccgaccaccacatagtcagggttcacatcattcatggtgatgcctgcgtcgtagagggcgttgagtagacccgcctcaccgataacaaaggcggaacacccgggcgcctgctctttcaagaaggcggcggtggccaaggcactggtgtaaaaatgttcccggggcacatccagccccatgcgagccagcttctgctgcagttccagaggggtgtagccgctgttgttggtcaggaacagatattccttgtgctcgtcgtgcagccattggatgaattctgtcacgcccggcagaatacggttaccgtggtaaatcacaccatccatatcacagatgaatccttttttcccattgaaatccagcatagttccccgcttctttcttcagcatcctgttgcactacgcaaaggcgttctttttatagtttaagggcgattccacgcccttttcagtataacagggagtatgtaaaataatcctgcaagggcgtgtaaaaagaagataaaactttttgcagatagacagttatatacgctcggctctgaccacggatgtcgtcaagaggatgcgtggatcgatttaaacccgtttcctcataaaatgcacaatcgaagtggtcatttctgtctatagggtcatggatcgcatcggccacagggcgtgtatccccgaccgatcagttcttctcgtcgggcattggtaaagtctttgttcttgtcgttcatctgctccacgctggggcagtccgggttgtggaatttcttggtatgggtgttcagcacataccgagcgctttggggcggtgccgcggcaagtggtgtgtccggcgccgtttggctgcccggcgaccaatccttatagggacttgtgctgaaccagcatttttctccatcggaatatacgctaatctcgccctgcttgtccgtccgatacagatcgacaccatgctgctgcagggcgtccaaggtctgttctgtagggtgtccatacgggttgccctcccccacactgagaaaggcatatgctggggatgccgcctccagcagttcttcactggttgaagaaccgcttccatgatgacctaccacatacagatcgcaagccagagcttgcccggaattcaccatgtcctgttctgcgtcctgctctgcatcaccggtcagcagacatcggacgtcaccgtattcgatacgcagacaaagcgaattgctgttatcggaatcataggcataattccctggcccaacaacctgaatttctgcaccgcccagagaaatggtatctccttgggcggggtaaatcaccgggacgctcttttctcccagcacgttttgcagggattgatagatctgggtatcggtggtgtagtccggcatcagggcttgttccactggcgtggtatggagcacacccaccagaccgctgatgtggtcctcgtcatagtgggaagccaccagccactccagttcgaccactccgtgctgttgaaggtaggcgaccacatacgaggacgcgccgcgaccgccgccgtcataaagcagatattcgccatccgcttgtaccagcactgaaagcccctgccccacatccagcatcgtcagagaaaatgggacatcggtggtgtattcgattgtcggcggggcaccggtttcctctggcgttatagtaaccgccggggccgccgttggggcgggtgcagggctggaagtacaggcggcacccgtcagaatcagcaccaccgccaaaagagtgctggttatcttcctgagcgcattctttgccataaaaacctctttatccaattacagatacaccatattgtattcttgccgttccgcgaaacatcgggaaattcctcgaattgttggatgttcagcccagccagtctacccgaatatgggttattcaaattttatgcctctcccttgctcaaagtcaacccgtattcgggtaattctgttcctcttcactgttatgatttttgtaacccgaaaatgggtagtgggagggcaccagatggagtattcatctttatatgtggagagaatccgaacattgtgcaaagtacggggaatcagcatcaataagctggccacgatgagcaatgtaaaacagtcgacactggataacatcatgcgcggccttaccaaaaatccgcgggtcaaaactctgcacaagattgctattgcattcaatatgacgctggctgaatttttagattttccggcattaaatgcctattcctttgaagatgacgaggaagaggaataaacgataaaaactaccgtgctcccttttggctatggtacaacttttttcttctgggccatcttttcccaaactcacgttgcaattcactacatttttatggtatgcttataaaagcgtcgcacgagcgcacatttcactttcgcagattaccgaaggagcccattcccatgaatgtcctgttcagttccatggagtatgattttcattcgcttatcaaggttgccgaaatggcggggcttgccggggtcatcacctttcatcaggcaggcgacgactatctggtcaccttcccggatgtggagaaaaccgaggaaatggtacaggattatcgcgctcgtctgcgggatttggaaaataacatctggtcacactgaccttttatctcttatggggctgcctggggcggccctttatttttttgcttcatacgcattatcctttcatttgctcgtcgggtttggtggtcatcaggcggtagagctgcgtgtccttggggaagttgttggtgaagggaaccagatttccggcgcagcggatcaggccgcaaccggcaggcacattggtgatgtaccccagctgggtgtccgagatgttcagcagtttggccagctccgcccggtcggtggcgctctggttgagcatgatcaagaactccgagttggcaagcatcaggcgggcggtatcggagcgcagcagttcgtctacattctgcgtcatgccggtgatcagaccgttgtacttgcggatgcgcttccagagcttgtagaagaaattggcgctgtactcgtaccggaacaaaatgtagaactcatcgcagaagatccaggtacgatgccctctcgcccaatttttaatcacgcggttgtagatagcgtccaaagtcaccagcattccgagaggcatcagctgctctcccagttcgcggatatcgtaggcaatgatacgtgccttggtatccacattggtaggctgggcaaatgtgcccagggtaccggtgatgaagagttcggaggagagagccagcccctgcgcttccggttccggctgcatcttgagcaggcggtagaagtctttcagggtgggtaccgctccctcgtacccattgcgaacatagggcatatagacctgttccgtacagcggcccaggatggatttttccttggcggtgaccagcccgctgccgatcagctgctcgaacagggacagcacaaactcgctcttggatacgatggggttgcgctcgtcgccgtaggcgcgatccatatccaacgcattgatgtgggtgtccgatgtagccgaaatgcggataacctcgccgccgaaggcttccaccagatgtccgaattcggattccacgtccagaatcaggatatcgtcttccgtggacagcgcgatctgcgcgatctcctctttggcgctcatggacttgccggagccggacacgcccagacggaagctattgccgttgagcagctgcctgcgatccaccacgatgcggttcttgctgacagcgttctggccgtagtacatccccttctgctgcatgatctcctgggcgcggaacggaatgagcaccgccgtgctttcggtagtcagggtgcgcagtgcctcgatgcggcgcagtccatagggcagcacagtgtccagaccgtcccgctgctgccagcgcagcgttgaaagctggcacaggtgcttgcgggcaacggagagcagcgattcggtgtcatcgtccagtttctccttggtatccgtcatatggacgagggtgaccagcccaaacatcatcctctggtcgcgggtggtcagatcatccagcatctccttggtttccttgcgctgaagttccatgtcgtaaggtacaatggccgaccagttgttgttggcgttctgcttccgctgccagttggtcacgttggtttctacacccaacagggtgttctgcagctgacgggcggcctcatcggtggggatgggcagaatgtcgatggacagcatcagttcccggtccaggtcgcaaagttccgacacaaagctgtccttcaggtagcttgcgaagtcctggagataaagcacacggcccacacggtcatcgatcttgaaatggtcagcggtgaactccatactgctaggacaaagccagtctttgaaatgctggccacgccgggccttctggtggatatcgaactcggcggcaggcgggtccgccgggcggaagaagtcgcagaagatccgcaggcgctcattgagggagagttcctgcgccaccgaggacagtgccgccagcttggtggtcagatcagtgccgacgcgggcaaagtaggtgcgggcttcctcgatattgcgcttgacgacgctgatggtaagataccgctcccggacaatgctgttgttgttctcggtgacctgagcgcgcagcatctcgttgaattcctcccgatagttgtccagaccatcttccttgagaggcagcagaacggaccgctcgaattcttccttgttgatccgccggttgtacagagtgatcttggccgaggcaccggagtccagtgcattgagcaggtcgcagtaatccaggaacattgctgtcttatcatccttgccggcgatagaatagttgatgtcggtgaacgaccaggtcttggagaactggtggcccacctgaaaaattccgtccgcccagatgcggcggatgggaatacaatcctgcacgttgcgcggaatacggaactttacgcgctcctgtttccgtgctttggacagggtcttgatcaatggcgcttctccttacggctgcgctttttctgtttgggtttcttcatacgcattcctccttggattgcatcgtagtaataactgttggaacggtagaccagccgcttggggctcaggagttcggatttgcaccacgcccaaaaccactgctcggcagtcatgccgtggtaggagaaaaatccacaggccgcgaagggcgcggcggccaggatgcagacccagccgatttcctccgttcccagcagcgggcggagcaaaaaataaactcccactgccaccccgagggccagcagtgagcagataaactgccgggtgttgagaccgaagaagatggtctcatgataatcccggacttctttggggattttgatttccataagcactcacctttctttctgttacaggcccatgatttccttgacgatccggtcacatcccttgaccgcgccaaccagcaccagcaggttaaaggccagttcccccacataggtccagacggcggtcaccaccgagacgctggtatccacagcgggcggactggaggacacagcggagaagatgatgcaggccagggcgatgaccacgccctgcaggcagactccggcgtaactgcgcaggaagttcttgcccacattggacgtgggttctccggcaaaggacgaaagcggaatgggcgcaatggccgcatacatccaaagggaaaacatccggccatacacggtcaggatcattacgaaggacaatacggtaatgagcagcccgccgatcagcgtcacggcccagagcgggatggaatcccaaaagcccacctggttgatggcgtcaatcagatcctggggcagtgtaaccgcgctcattccggacacgccggattggttaatcaccgtggagaccataccctgcacgatctggaagatggccagcatcagatccagaccgtaagtcacggcagctttggcaagtgcgaagcggataaagagtttaagcgcctgttcggggcgtttggcctccacgaaggtaccgcaggtcttgaccacaccagctgcgaagaagagtaccagcagcccgtagccaatggcttgcaatgctccgtggatgcccaccatcaccgcccatacctggccctccttgaaggtctgcggactttgggtcagcagctgccagatctctcccagcttgtcattccaggtggtcagggcagcgttgaggttgcttacgatccagttgtcacccacggtgcatcacctcccttcctgatatgttccggcacatcagactccggtgccgacgatcaggtccaggatttctttggcaaaggtgatgatgataccgcctgccagcgtcaggaagccctggctgcgctggctggggtcatggctctgcagcgacaggcccacctgcacaatgccccagcccagcaggatcaggccgatggcacggatgatggagaagatgaaggtactgaggttgttgaccacagtcagcggatcaccgtcggcaaacaccggcgtggcggcacagcagaccagaaccagagcggcatacagcgcgaaggcgcggcgggtcagacgtttggtgcggagcatatcaatcttgttgcgatgcatgggcatccctccttggataagtaaacatgggtttcggttgttcggctgccggcaggaaatcatccatgtccagcagttcgtagttttctgcatcgcccaccagatcctcgtaagcatccggtgcggcggtgtagtcgtaaggcggcgcgccgccatcttcggtgaatcggatattcgggtgccggagcaggttgtacttccagtccatgaccggacgttccccgcgcacaaacagcagcgccttgtcattggaaagcaggcgcacttcgtcgggggtcatcaggtcgcgggctgcttgctggtggctggtactgctgctgccgctgcggcctcgtgaaaggcttcggctggtggtttctaccgtttccttgccaatcaactccgacacatacttgtgagtgccttgctcattgccgcccaggtagagaaactcatcgcacagacctaccagcgattcccagctatccttgtacatggacttcagctgggcaatgttctgcacaatgattgaacagaagatgccccgggaacgcatggtcgccagtgctgacaggaagctgtccttgggcagtgagatgttagggaactcgtccatcaggcagtggaccggcacaggaagccgtccgcgatggacacgatccgcctgatagaaaagtgtctggatcagctgggtgtagaccatacccaccagatagttcaggctcttgtcggaatcaggaatgcagcagaacagagccacccgccgctctcccagatcgtccagatgcagttcatcggtcatggtcagccgggcgatctgtggcagattgaaggcagccagccggaccccgacactcaccaatatggacttggcagttttgccggcagcctgcttgtaaataccatactgcttgacagcaatgctttccgggtcccgcatggccagacgctcgaagagtatatccagaggcgactcgaagttctcgtcctcctccttgacctgggcactccccagcagctccatgaccatgccgaagttctgttcctccggcggggcttcatgcaacaggtacagcatgagggcctggagcaatgcggtttcggatttttcccagaacgggtcggagctctgcgcgtggggaggcgtggtgttctggatcaggttggtgatcagctgcagcacctctttgtcatcccgcacataccggaatgggttatagcagaatgacgcatccgggttgagcagatcgaacactcggacttcatagcctgcgcactgaaggaagccaccggtcttgcgcaggatctcgcctttgggatcagtgatgaccatggagcagccagcttccagcacattgggaacagcatacgttcgggtcttgcccgcgccggagccgcccacgacgagtacgttggtattgtgcttgtgtttatagccatccacaccgatgcggaagttgcgcgtcatcagcaggttggggccttgggtatcgcggtatcggcggttgagttctttggcgttcccccagcgggcagagccgtgttcctccccggggcgcgtgttacggtgttcactggacttgacgagggcaatcacggtgtacaagccggtgaagatcagcaggaagcgcggggcctggctgttccatgcaaggggaagcggctgtgccagcatctcattgcaggcgttcagcagcccggataggttcatgccgggctgccagcgcatagccagggcagttgcggcccaccagagcagcggaagaggcagcaaccagatccaccaaggggtcggtgttttctgcaatcagcaccccttcaccatcaacggagcaataggatttacaatctgctttttgattccatcagccacgttccatatttcctcttgaacgctttggcgaagcgctttgctgccttgtcggcggagccacttcgcaaatgctttccaacacttcttccagcagtttctttttgaatggatttttgaaatcactggaactgcaatatacagcaccgttttcaccaatggtgcatagcagtttcagatttccgggcatcttgtcatgacggactgccagttctccttcctctgtgatatgtgtggaaaagccacgtttctttaaggcttctgataccgcctcataaaattgctgcgatgctttgtccttcatcgcacatccctccccctttcgcgaaccattgttttgacgctttctgcaccgcctaaacgctgcctcttgccggcttcccagtctgttcgtttcttccacagggcaggaagggcgtgcggcaaagccgggtccacttctgcagtatcgatggcgagcgtcttggccaggtcttcagccagatcctctttgggttcgtctttgtgctgggccgagaagaaatccctggggatattgctgcgctgcagccggtactcgatctcggtctgtagcatctggtgttccaaatcctggtcaaacccacccacatcgtatcttcggatcagcgcacggttcatgcagatgcgctccacctgctgcggcagatccttgcaatcagggtaacggcggcgcagtgcctggccatcgggagcatctggccggaacaggtcaagatatttcttaccggtataggcatacatagcaatatacccacacagttcccattcggcttctccaaaaggcacccgcatcctggccagacggtcaggatcggccaaggcagacaaatacacggcccgcccctgcatgaccagccaggcacgaaaatccataaagcggtcatcggaagtgccatagttgataatagaagctgccgcgcacagcttgggtgtgtcggccagctgcataaaggcttgctgcagacggtaccatgcaaagaagtctcggtcgggcaactgggtcagctcccaaaacagcgcctccatcatggaggcttcattttgcggattggccacctgttgcgcccgctcgatcagattccagaaatcatcggtcgtcatgctgtttccctcccttgtgggcttcctgttcactccataccaatcgcttttccgtcaggttcggcaaggcctgtgatacggacgattccacttcggagttgtcgatttccagcccttttgccagttcccgcacttgcctttgcagggtttcttctgccggtttgtagtggaacagttcattggtaaaaccggcatggtccagaacctcgaccacatctttttccaacgcagttctttccagaggcatctcattttcatccgggtccatccagtgatacaggaggtatcccgctgcaatccgttccacctccgtttccaaatcaggatgctgcgggtatcgggcacgcagttcctgcattgccgggccatccgcacacaatgcctgccaccctgcctttccaccgtaagcaaaagctgcagcatgtttgcagtatccccattccgtatcccggaaacggaaatccatatcggcaaggcgatccgggtctgccagtacctgttcatacacggtgcggccttgcacgaccagccaggcgccgaaatcggcaaaaggcatatcgatccaatggccgttcacaatggctgctgccagacggagtttcggcgtttctgccaaacgaatataggcaaactgttggtcgtaccattggagcaggtccggctccggcagttttacaagttcacggaacatggcttccaacatagaacattcactctgcggttcagccgtctgctgtgcccgctcgatcaggttccagaaatcatcggtattcaaaatgcatccctcctcatcaaatagaaaatgccagggaaaacttccctgacaggatacagatagtacttcagcgtatatgcccgaagagccggaacggtactttggcccgcagcagattggcaagagcagcatcggcagcatcggtataaccgccgctggcaatgcgctggttgcgcagatcattgagggcagtccttgccagcaggtattcggtatcccccaggcgcagacgtccgggtgccgtggcgtcgatgcgtagaatcagctgtccgatttcggtatagggtttgcccgtggcctttctttcacgatactgcgcatggagtgcgcggatgaggatgcttttgtcgttccggtccatcttcataactcgttcgctcattggggttcctcctttggttcgttttaccgaaacagtatcacacaccggcgcaaatagccatcccccaaatgaaaacaaacggaaaacttttacccgcggttcgggccatcgcgtcggattcggatgggcgatctgggcatgggcgaatgttccttgctggctgccagaatggcgcggatctcacccagttccagccgaacgctggcgcgtctaccccgggcccgcacctggtcggcgcggaaaccgggccacataggcggcgatttctcgctgctgttcgaggaaggcgtgaacggaggggcgggttccggctccgcctggcgacgagccggggaaggaaaaaccggcgtttcctccttctgaggctctttctgcggggtatccgttgtttctgcgggcactgcttccatgtcctgcgccacctcgtccaccgcttctgccatgccggtgtccaccacatccagctgaaggcggtcaaagatccggttgactttggaggcatcgtcagccagaattgcgatctcgatatggccgggatcggtcttgtcccgcatggggacaaacagcagaccgtgcatcttcgcttcgtgggcgaactcccgcatccgctctttctccaccgagaaaaacttcagcggcttgccttcccgcagcaggcggaccagcctggttttgccgtgggtctttttctggtcctgaagcaccgaggccacaaacttggcaaaggtgaccgctgccgatcccgagagccgcagggcaacctcggtgccctccagcgagtagcggacaacctgatctgccggttctgcgccgtagttcatctggcttctcctttgcgctgatgagtttctttggccttcgaacgactgatcacctcaaaggaatccgttccgggcagaaggctcagtgaccggccgttgtcccacttcataagcagctgccccgcatcatccacgcccatcacggtacctgtcgtaccgggcgggataggctggggatcgtcgggcatagccagcaaccgaacgcgggtgccgggcggatagtggtcacgggcgtattggagccgatgtttccattgtgtttcgttcataggcgtttctcctttcctgttcggcacggcgcttctgttcttcttcctgacgctgtgccatttccagtgaatgttcttcgattcgtttgcacaacttgatagtcttgcgcagttccttcagacgttggatgagcagtgggatctggtcacttttcggagcggtcttgtacagacggttgcgctctgcgttcagctgtcgtacctccgcttccgtttgggcacggagatctcgcagctgcgccagagtgcggatatcccggttcatcagtaattccatctgcttgatccgtttgtcgagctgacggatctcttcccgcacggctggggatggatgccacggcttgcggcggaaaacgcccagcatatacagttcccgataatagaaaacgcgcaagcctttgagcttgcgcgcgttctggtaggttccatgcagccggacatggcggacgtttgcttcggctgggtaggttttctgcgaatagaggatacgctgttggatggcctccggggtatactgctttcccagggttttgaaacgtacaaaccgttctttgcccggtggccgtaaggtgggatactttcttcccatatggatctcgtatccttttcgttccagcgtcctgacaaactgggtccaggtcacacattggctgacggcctcctcgatatcctgccggatcagggttcgccacgtcggcttgccggcttcttctgcctgccacttggcatactgctttttccctcgatccccttgcggatcttcaatcaccgaaagaccgtatcttctgcagagtgcatcggaacgggcccgaacttcggtatagtaggacttcgcattgctgtggtatttccggccattgtccagagccactgaacaccacacaatgtgattgtgatagtgtttggtgttgaggtgggtggtcaccaccgcctgaaaacggccttgcagcagctgctctgccagctccaccccgatttggtgagccagttccggcgtgacttctccttcggcaaaactttggacgaggtggtatccctgcacaccgtctgtttgctgccaccgctgtaccgtgtctcgcatatcctcgaaggccgtttcacacacacagctgagtcccgtttcaaaacaatccgactccgtcttttcgcggttgagggcatagtccactgcgtcccgcaaagagtttggaccgcgcgttgtcttggttttatcccgcacatagtccaccgctcggtccaggcggcggacggggataatggatgtataggccatggctcatcttccttcctccctggatttcctgagagttttctgtttaggttgcgacgattcttccggcagacacgtatggctgatgttgcggtagtccatgtcgaagaagatttctctcaattttccgacaaaatggttttcttcggcaattttttcgggtgtcccacgactctccatataatcttcgggatcaccatacaggcgggtcaccatctgatcggttttgggatcataggatataaagcgcagcgcaaagcacagtgacgacatttccatgcccacaaaggatgcaaagtgctgctggcggttttccagttctgttttcggtggttcgatttccgatgtcggctgcagttgcagattagttgtacagacattggtccagaactctatcggcaaatcggacggcagatgcagcctgccatgttccggaatatgggccatgtaatacctctcagcattcggttctttgctgaccagaataccatctttcccgttttcgctcaccacaagcacacagttccatgcctgtttttccatgtcgaatcccatacattgacgcaaggctttgagtgcatacggaggattgcgaaaatcatcatgcacaaagaaatggtaatccgtttcgctgagtaccagtgctctctttacaaagaacttctgcggaggaaaaaatggcggctgtgatgccgccatgtttttaagttcgtcaccattatgcgcgccatacataaaattggcggtttcctgatattccttcaccattggctcttcacctccttccagatttcttgtgagatttgaatcatcttgtctacgctctcctgaccggccacaccggtactgtttgcccggtgggccagctggttggcattgttgcagagtccggacacttttcgcagcaggtcttcgtgatgggtacaggggcgcggacgaatggttttccccataatcagcgcccgcaacaacttttcacgggacaacccgctttgtgctgccagctggttcagatgctgcagttccttttcagtcagccggaggggaatgacattgcggcgctttcgcataatcagcgaacagacagcacctgctcgttttttcccgccgaacacatacagggttccaatgtcacctgcttcttcggcacaccctcgagagccaaaagggccttgtccggcagataggcaccgaacatctgcccagccaccctggtcaggaggattgcttctttttcagatgcggtggtgaccagagaacaatggaaagccccattcgccgtatcgtacccctccttggggatgccagtttcaaaggcgtaccgctgccccagggcactgccgaattgccggtagtctttgggcgagagctccagcatttcttcggcaaggaaggggtacggtacgccctccgctgcttcttctttcagccgtttcaagtcggtcaccagcgggtaaaattgtgcccgcatctcaaatccactcatggttttcacctgttcctttcccaagataatcaaagcgttgccgatcccgttcatgcaaaacactgttaatggcccaccttacggagcaccctttccgcgggggactcttcgactacgtcgccggtttcaagatacagtatgctggatttgggaatatacttgtaaccatcaaacgcgttgccaaccgtaaacacatccgtaggcgcagcctttccaactcgggtgacaacactttggtcgtcgggcgtctcataatcctcactacaacggatgatggttccgtccagcaagtgaatgagatactcctgcagcattatgacgtcttgttccatttgtatacctccggtattctttcttcttgtactttggcggcactgcgcttgcaggccgtcgggggtttggggcacaccccaaaaatctgcgtttggatatccaaacgctatgctagcaaaaccgtctgccagcaggtgagaggccgtcccctcccctatcagccggtgaggacttcccctttctcggcagcctgcaaaacgccatccagtgtggtaaggaccttgctgtatttcttggcaaggcccacttccgcgttggtagtcgcatccgaatgtttgctgcaaaccacaagaaccgtgcagcggagcagcttgtcccgcacgatttcgttgaaagcctggcgttcatcagggttttccagcacaatgaactgcccgtcctgcagacgagggcagactggcacataaccgcactggaaaacagtgcggcaataaccgcgcaatgccttggaggaagtgccttccgcagcacaaacataagcccaaggtcgtttcatatcgggtctcctttcaaaaaagaagcggagtgaatcatgctatgattcactccgctattggtttatgtagagttcgggaaaagtgaatcatagcatgattcactttttgttttgagtgtctgttcctcacgctgtatctcaagctggaggtcctcatcggtgagctcgttccccaccgcttcgtaatttctatactgtagacgactttcctaaaaagcgtttactacgacaatcacgggtttgcccggcggtgcgcacgccgccgccagaaaaacacccctgcaagtagaaacacgacgcaaccaacggctaccggccaaagcggcggggcgggctgctgtaccagcacagccagcagggtttccccatcttgcaaggtcgcaaccaggcggctgtggtcctgtgtggtcgccacgtcgtgccaggcagtcccgtcataggccatcaggcggacttgttcggctgtatagccgtctggcggcagatagcgcaccgtgaggccgctttccccggcttcgggcagcgtccagctttccagccaggtctcaccgctgtccggaggcgcagtctcacaggtggaaacggaaacgagagattcgctggtgcgcagcccttgcagtaaaaagaccggggtgttgctatcacggacggcatcactagtaaccaccgcagcggggtcggaataggccgcctggaaggtgtcgtcaaacatcacacattgcaggtcgatatcctccagccccgcccaggagccggccacgccgttctgctcggccacttcagggatatcctcgggggcgatggcgccgcccggcgtggtggaaacggtctggacgctgccgtccacctgcacaaaggtcagggtgacctgctggaagatggcaggcaggtcgggcagggccagaaattcctcctgggaaagtacctgggcaacgcctgcatagctgacgccgtcgatgccgcctttgccctgcactgtcagatagtagttgtcctgtaccgtctcagccagttccttgtcctcctgctcccaaattcccagaatgttgcctgccttttcggtgacattttgcagtcggaccatggccaagcagccggtcaccacgtcgccccggcctgcaataccgcccacctccgattcgccaatcagatcgcatttggcgctgtcattgcgaagaaagccgccggcccgcccggcaatgccgcccacgccccgagaggcgtcggctcctacggcaccggtattgccgcactcacgcacaaggcccatggtcatccaacccacgataccgccggcgttttccttatcgccttgtaccggtccttcgttgcggcaggtcaggatcaccgcccgcatctctccgctgaaatgcagcgattccgttccggaaatatccacgctttccgctgtgtccagttcgttttcgggagcaatcgtgcccacaatgccgccgatgttccagtcaccagagacagccccgctgttggtgcagttttccagtttggcgctttggtcctggtcggtatcctggtcggaaacatcggaaaagctgccgcccagcgtctggtctgcgttatccattgtggcctggatggcattgacctgatccgtcagggcctgtatatcctgctgtgccgtcgctgcactgttctgggccgaggcggtcagtccggcggctgcctggtcaattttctgcagactgtcggtaagctgattctgggctgccagcagactgtccgcatccggcagctgcaccgacgaagacacatcctccggtgtgggcagttccacgtcggaaagatcgccgggttccggcagggagtccaccgcgggcagttccgggagggtcagggaatcggccgcgggtaattcggacgtatcggtcatggcggagatcgcctcccgggcgttctgggcctgagctttcaagccggacacctgcccgctgaccgaggaaaggctgctctgcgtatggtcggaagcctgattggccagggtgttcagggtactcatctgcccctgcaaaatttgcagggtgtcagcgctgtattccagccgggcggccggttccagctgccctacaatgccgcccacatctttgcggccctgcacagtgccgcggttggtgcagccggacagatatccgctctgactgccagcaataccaccgatgttgtaacccatcttggggtatcccacatcggcgtgattctcacagtcgcgcagtacaccactgctgctgccaacaacgcctccgatgtcggtgacggtattcgcagcttcggaatcggtcagcgtttccagcgtgatgtcggaaatttccacctgattctgctgttcggtggtgttgacggcggcttcattggtgcagccgcgcaccacgccctgattttcgcctgcaataccgcccacaagatggctgccgctcacggtgccttcggcggtgcaggtctccacgatgcctgtaacggtgttgagtccggctataccgccaacctgtcctgctccttccacggtgccggaaaaggtgcagcgcagaatggtcccggcgttgctgcccgcaatgccgcccaccgtttcccggctgccctgaggcgtgacgattccttccactgtaaggtcctgtacacaggcggttttggtgaggtagcggaacaacccctggactgatccggcctgatccaaagtcaggccggtgatgcggtggcccccgccgtcaaagttcccgctgaagatggggatgcccggccaggcggtgccgttcaggtcgatgtcggcttccagccggacggtcagcccctcgctgtaggaatcctgaacacagttttccgccagtgtcagcaggtcggaagcggaggaaatggaaagcaccgcgctgttctcttcggcgaaaaccggcagagaaaaccataccaagcaaaggctgagcagcagcgagaccgctgcggagatttttttatccattgtgggtttctccttcctcctgcggagcgcacagggtccccgcggtcacccgggcatccacctggccgcgcaccacgccgtcaaacattccatctaccacgccgtttaccgagccgtgcaaacgcccttgcaggcgcaccgcgccagatgcccggcggcgaggcgcttccggcggctgcagccggaagctggtgcgggcaatcagtgcatcccccagcaccaggatcgccggcaggacgcccagcaccaaagcgatgctgatgatggtgccccggcccaggcagacacccataatcgccaccacgggctgtgccgaaaggttgccgatgagcagcccggaagccaccatgatactgcccgaagtaaacactgtggggaacgccgtgttgacggcggccacgatagcctgctccggcggcaggctgcggcgctgttcctgataatggctggagatcacgatggcatagtcgatgttagcgcccatctggatggcgttgacgatgagatagcccaggaaatacagcggctggcccatcagcgtggggaaagaaaagttgatccagatgctgccctgaatcacagcgatgagcagtacaggcagcgccgccgactggaaggtgcacagcagcaccagaataacgaacagagccgacaaaatactgatgagcagattgtcggtgacgaaagaggacgaaaggtcccgggaactggtcgagttgccgatgacatagtagtcgccggcataatgctcgcccaagatctcccgtatccgggtcagaaaagcaaaggtctcgtcgctttcttccggcaggtccaggtaaaccaccatacggctgtatgccccgtcctgcagctgccgccgggcgctgtccagctgctcgaacagttcgtccatctgctgctggtcatcgtcggccagggtgatgttgtactcggtgatgtggtctttgaggtacatcagcaggtcgaataacgggatcttgtattcgctgatgccggtcagcagcgaaccgtactggtcgttttcagccgcgtaggcagcatacagagcctgcgcagcctcgtaatccagatcggtcatctcggcaaactggcgaggcgtcagggaatctgccagcatatggccgtcgaccacctccagattggccagcccggtggcacttttgacttcggggcaggcggccagttcctgcaataccgcccgctcggcgtcgtagtcgccgccggggacgatcaccgccaccatgttgttgacgccgaaagcttccttgatctggaagtaggctttctggcgctcagtctgtttggcgatttccagatcgttgtagctgtaacagtacgggcactggctggacagccagaaaccacccacaagcaggaccgcaaacagcagcggcagtaccaccttgccccgcacggccaaacggcccaccggggtgatatccggcagcagttttttgtggcgtgttttgtcgatcagaggacaaaacaccatcagcaggcccggcatcagggtgaacaccgtcagcaggctgaacagaatggctttgatgagcaccagagccatatccatgccgatggcaaatttcatgaatcccagcgcagccagaccgctcactgtggtcagtgaggaggcgctgatctcggggatcgctttggccagagcgtccacacaggcttcccgtgcaggcttggtctcgtgctcgtcagagaatcgatggcagaggataatggcatagtcgatggccaatgccagctgcagcaccgtagcaatggcgtccgacacaaagctgatggtcccataccagaaattggtgcccatgttcagcagtgctgcagccccgaaggtcagcagcagaaccggcacctcggcataggcgcgggaggtcagcgtcagaaccgccacgatgataaaagccgacaccaccaggatggtggacatttcctcctgcagcatggcgttttcgtcgtagccgatctgggtgtcgatagcggtatcgtacccggccaggcagttttccatggccgccagcgccgcctcggcagccgggtcggcattttccacccccaagctgacttcgtacagggcggcagcgtcccggtagtggtcttcgctgtcgtcaaaatccaccagttccacatcggggatctgctccagctcctcgccaagctgctcggccgtttccagcgtaatgttgctgaccatgatccgggcggtagccggggtcagaaaatgatcgttcatcacggtcagaccctggcgtgtctcggtatcctgaggcagataggcggtgacatcgttttccaccttgacccagttgcgggaaaacacacagaagaccagggcaaacacatataagagaaaaaacagattccgtttatccacgatccaggccgcaatacgctgcatgacctgaccgcccgcattcttttcttccattcatatctccttcgcaaaattaaacgactgttgacttttgtccgcttcatctatatgatagagaaaagaaatgtcacgcgcaagcgtcaaattcttcatttttgttggattttgtgcagatcagcgcaatgtatcggtttttggaaaggagcttccctatggccaaagcagaatatcgcagtgcgatccgctcgcggcagatgatcaccgcagcgttggcggaccttttgcaggaaaaaccgctggacaagatcacagtcagcgatgtggtgcggcaagccggcatcaaccgcagcaccttttatgctcattatggcgacattcccgatgtgatcgctcacctgatcgacgagacttttgcttgcctgcgggacgaagtctattcccacaccggccagctggaagacaccaccgaggctctgctccagcgtgtgcagagtattctggagcaagacctggatttttaccgcaaggtcatgaattccagcgccttcccgttgatgcagcagaaactggtggacgccttattgcaatatcttctccaacgtgaatcagatttcggcagcagggaccacgaggaatattcctttcttttgctgttctgcgccggtgggctgaccagcctgtaccgggaatggtttgccgggcggttgcagatcccgctggacgaggtgacacagcgggcagcccggctgctgcacgggctggttgacggacgttgagaaaagggtagatgttgcggcattgatagttgggaccgactgctgcgcgcagaaaatcaccttatgtgtgcgtccaactctctctgtataagtagaaagatctctggttcttcatccataagtaaatctgtccgcttgcgttccaccatcaagattgccaatttttttcgcactttcaaacgaaccgcgaccgaatcagtcacaggtctccctttacactcacatgctggatgccatccaacgtggtaaggactttgctgtatttcttggcaaggccgatttccgcatgggtagtcgcatccgaatgtttgctgcaaaccaccagaaccgtgcagcggagcagtttgtcccgcacgatttcgttgaaggcatggcgttcatcagggttttccagcacaatgaactgcccatcctgcagacgagggcaaacaggtacatacccgcactggaaaacagtgcggcaatagccgcgcaatgccttggaggaagtaccttccgtagcacaaacataagcccaggggcgtttcatatcggttctcctttcaaaaatgaggcggagtgaatcatgctatgattcactccgctgttcgtttatgtagtgttcagattcacttttgggtttcgagcgcctgttccacacgctgggtccccagctggaagtaggcatcggtgagttcgatacccaccgcttcgtagccttcctgcaccgcagccagcactgtggtaccggaacccgcgaacgggtcgaggattcggccaccgggcgtgcagatctgcaccacatcccgcatgagctgcagaggcttttcggtcacatggatgcggttggcagggttcgcctgacggaatacccccggcaaacagcccacattgcgctccagcggcatcttgccgttggagccccaaacgataaactccgcctgctggcggaaccgccctcgctgcggacggccggacggcttatcccataccgcgatgccgcgccaggtccacccggcccactgcagggcatcggtcatggagggtagctgccgccagtcgatgaacagacagatgggcgcgccgggcttgcaggcggcacgcaccacctggagccattcgcacatccaccgggtccagctgcgctggtccatctggtcgctgtcgaaatccggcagcgccttgtcgccgcgcaggctgctgtacttctcggtggtggaacggttcttggcagtctggctggcaccgccgctggcatagggcgggtcggtaataacggcatcgaaggcgtttttctcaaactgcggaacgatccgcatggcatcgccgtgcaggatcgtccagtgatccccgccccgatgttccggcatggcaaaatcgttggaggtaaacaaagtggtctgatgaagggtattcgtcaaaagcatcatcctttctattattcagcgttcaggcgctttcggcggcttgacctgctcaatgctgtacagccgcacatgagtcccgttgacggacaggacactgtttgtaggattatccaccgtgtttcccggcaggataaaggcatctgctgccagataaacggcgccggccacggtgcccatcacggtggcgtgcccttccacgaggggtacagattcagtggcgacatttttgcgtacaacagcttctccgcaaaccaatgcattttcctgaactgtaccacccgtcacaatagcacgatcccgtacgcgggcatagccgccaatctcggcttctccggagatcagcgcagaaccgctcacccgggcatggtcagtcaggaatcccccctttgtcactatcgcgctttcgcagcatatagcctctccatagatccaggcaccgtcgttttcctgagacagattctcctcgctctggacataaccgcccagggtaccgggtccaacagtttcgcttacccgccgaagggcgcggatgcggtgcaggccggggtctttgggatgttcgatgtcagtgatctcatacttcttagaaggcgtgacttcctccaccgtgaagtcgaagtcatggtcctgccagaaatgcacatacagcaggccatcttcggtttcgatttcccgttgctcgaagccctcgccccagccatccgaatactggccgctcaggtagtccatgagcttgtcccaaccgggttccgtaagatcctcgtccgcccgtaccgtagtgcagccacaaagccgcccgttccagacctccaccgagggtaccagactcagaacgtacttcttaatgtattcgctctcatagaagtatttcatgagatcttcggtaccgttgtcggtgtaggcaacgaccgctttttcgatgtctttcgcatagggcagcagttcttcgccgttgtattcgtcgacggaatcttcgtattcatactctccggcctggtacagttcccccgtcagcggagagtacattttgaaaatgcgttcactcaatcgcatcacctccaatgattgtgttttggagcctcggtcatatcaccgttcaggcccgctctttgtgcgatgcttttccggcatgagcggctccatatcctgaaaaaagtaccgggccatctcacgcatcgctgtgaagtctttatcgtcgggaaccgcaatcgtgatgataacggcatccgaaatgcgatgttccccgtttttatggtaaatctctgagaagaagccccattcaccatccgctcccgtatggatttcatccgaacggtcatccaccttcagcagatagcgggccgtatctaccaggaccaccttggttttttcttcctgccccttatacatctgctcggacagatatacgtccatgtgcttttccggtgcaaagtacagggtcatagttctattcatcatgtcgggacagttggaaaacggcttttcttccaatacaaggcgtgccgtatcaaatttggtgagaacgcgatagtctgccaccagttttttcaaccgtgcgcccttgaattgttgaaagtaaagcgggtcaccaaaaacaacgtgatccggccgtttgatcttgtagatttccttcattgtttttgttgctcccttcgcttaccgcacagcatccaagcgctgcctggaacaggctcgccttgcctgcttgatttgtttggcgagatcagcatagtccccgccctcgatctgcggcaggcacagggatactttgtacttggtgccgagattgcgggcaatggccaacgcggcgttgcggcccggttcatcgttgtccatacacagctggatggtatccacatccgggtgctgacgcaggaattccaccagtgccaccggagtcttgatctccacattttcctgttccggggcatagattccgcccagggagagccggtacttgtctgcggtattgtcggagagggtcatctcggccatggcatcaatagccgcctcaaacacagccaccgtggttgacggatgcagcggcgggatgcagaagccgtaccgcttgtcgctgcccggcgtttccgccttgaacgggcgaccgtaggagtaagtaccgcgcagggctgcataccgggccgtgccggtttcatccttgccaacaaacacacagttgtggtacggaaggctttcatatacgaggccacggtccacacagtagctgagtaccaccggggagatacctcgcccgcaaaggtacgcaaccaccctggcattgttgggggccacaggcggcaacgtgaatgcaggacgcttctgctccaccgcttcatgggggaccgggatatatccgggcacctcatcacacagcatccgcaccgcttccacgaacccacactgctccacatggacgagatagtccagagcagattttccaccgatgccccggcttttccagtgccagatgctggactccccattgatcttgaagctgtcgtggctgcgcagttcaaactcgccgcgggcactgctcttgaccagatccgtagaacgataccgccgcaagaattcaatggccgtcatctttttggcagcggcgatctgttccttactgacgccgggcatcagtcgatggtggccagcagcagaccgatcttatccacccgttcccaggggaagtcctcacgtccgaaatgcccgccgacggcagtgcgggcatacatcggctgctgcagctggagggtttcgatcatacctgccggggtcaggtcgaacacatggcgaactgctgcggccaggcaatcgtcctcgcagtaggttccggtgccgaaggtgtccaccgtgaccgccatgggtttggccatgccgatagcataggtcagagctacacggcaccgctctgcaatgctggcggccacaaggttcttggcaatgtagcgggccatgtacgcagcagttcggtcgatcttggtggggtccttgccggacagcgccccgccgccctggctcacaaaaggcccataggcatccaccataagtttgcggcccgtcagaccggtgtcggcttccgggccgcccaccacgaagctgccactggggttgaggatgacttccatccgatcatcggtgggcatccctttgagggcaggcagaatgacctgggcaaagatatcagcctggatatcctcgatgtgtacccctgcctcgtgctggaccgacagcaggatctgcgccacccgcaccggtttgtcatcctcatactccacgaccaccatggccttgccgtcggggccgatgccatgcaccgcgtcggtcatgcgggccagggtcagcaggctggtaaggcgacgggcgatgaccacgggcatgggcatcagttcgggcgtttcgttgcaggcgtacccgatcacgacgccctggtcaccggcaccgatggcctcgtcatcttcggggctgtctgcgggcacttccacggccccggcgatgtccgggctctggggatgcagatagcagtcgatctggaagcccttggggtcatacccgacgctgtgcagcacgtcccgggcaatgttgaacacgtcggggtttgcttccgtagtgatctctccggccacaatgatgtggccgcgggtggccatgacctcacaggcgacgcggctggtagggtcaccggccagacacgcgtccagaacattgtctgcgatgagatcgcagagtttgtcggggtggccttcggtgacagattcggcagaataaaaagttcgcatagctttctcctttgtttgtcgatgtgagtggtaaaacaaaaaggcgcacagccgggagggctgcgcgcctgatacactatgtattttctcatgggttatcgttcaagggttgacgtttgtttggggggaggcgttttctcgcggtgctcttcggggttcatgacctgccgatagcgttccggcgagcagttttccacaaagatcgagtctcccagtggataaaacagttgcgggtcatggtacagtgcttcataccgtttgacttgttcaggagtcaggctgcagaagtcatcctgcgtgagaccgaccacaaagaaggttccggcaatcacatcatagttccccagtgttcggttgaagggaagattttgcagcttgccttcatcattgcagacgatacaagcgttatccttccaggggtaaacgcattcaataagtccgccaacgatggcctgttctgctgccagactcttttcgatttccgcttccctgggatactgtcccggttcaacgatcagtactttcatgttctctcctcatattgggggtcatcctccggagaaggctcctcggtatgacggcgtttgtaaagcaggatgccaaaagcaatgccggcagcaccagccacggcaatcaacagccccagcggcgtgttatctcctgtctggggcagacttgcaaccggtttgggcgtaggtgccggtgtttcaaccggctgctccggtgtcggtgtgggtgtcggagacggcgtgtccggggtatcggggctgggtgcatcccgcatgaccaccataccgtcctccaacaacgtccagtggtcgaagatcaaccaatccttgccggtacagacatagacatccgcttcgttgagcagatcgccgttttcatccttacgctgtaccaacttgaagcggatgctttcagctacttcatacccgttgggtgcagccgtttcgaccagtgtgtagattttgtcaaactgcaatccacgaatctccgtgggcgtgtttccgctgacccactgacgaaccacattgccgtccttgtcctgaatggtgagggttgcacccggcaactcctcatcccctgtcaacttccgtttgctgacgaagaaggaagtagcatcattctcaaaggttttctccatctcgatcacaggtgtatcagcatcctgatagacgaactcgaactcctgatcgggtgcgtcgagataatacccctggggcgggcgcagctccacaatacggtagttgccactattggcggtggtattttcggggatacgaacaccttccatgccatagaactcaccacgcatggggaaatcgcaggtgaaggtggtatggccgttttcatccgtgggggccgaagtagcgatgagatcaccggcccggaacaagaggtcaccggttgtgctgtagatgtcgtccaccgtaatgaggttatagacggcacctgcaaccaaagcaccggttttgatgtcccgcttataaatgtccagctggggctttacacgttcattgtggaacttcaggacctgggcatcgatctgcgcggcgctcgcatccttcacgttaacgatttcatagttcttggtttccgatgcggagccatcgccaggattgctggtaatggtctttgccagaaccacatcattggtctgtttgtcccagacaaaagtcacatcgtaactctgcttggtgccgacaaatccataaggagcggtcgtttcttccacatgataggaccccagcggcagagtgacgattacctcacctaccgtgccatcgtggatgaccgagagaaaatcataggtggaattggtgcgcccaggggcaaaggcagcaatatcgcttgttccgtcgccggttcgcacaactgctaccacatcgcctttggcataccagagagttctgttcccgttggcatctgtctggcggtcctgggtgtagatgtcctcattggccgtgatggtatattcggcgtaagggataggccgttcctcatacacaaagtggccgggccgggcttcaccagagaattccggatcaaaggtgcccccctcgtcctcctgccagccggtaagaacttcgccggttttgcggattttcagaacacccagcgtttcgttattctggtagtcctcgtcgatcaccagaatgtcctggctgtcctcgctgtcatctccggtggctttgtatacacgctcggtggtaacagaaaagtccacatagaaactgccgtccgcaaaattgccggtatcgtcgatctgcaggtggccgtcctcatacactgccgaggctacccactcattgaagtacccattgggaccgttgacttctaccagacggtagtggcccagcggcagcttttcgggcagaaccagcataccggtgtcatcggtatagaaggtgtctacatccttgggcagcagcgggttggtggtatcggtcatggtgaccagcttggcatagccgttctcatcgtagatgtggttgccctgctcatccatccaatagatctggaacgtagtatccttgagcagaactgccttgccggtctcctcgtcgatcttggtcacccgcaggtacacttcgatttcctcatccagcaccgtatacttctggtagctgccggacggggtctgcacggcatccttgggattggccatggcagactggggattggattcgtccgtggggtcaatggtcacgataaagggttctgcctggaacacatccttgggcgtggtagtttctacaacgaggtactgtccgtagggcaggccctgcacccggatggtaccggtgtcattggagaaaatctccgccagctgatactcgttgggacggcccgtggccacccagccgtcaccgctgccgtttttgaagtcaccggcggcagtgagggtggcattgtacgcagcgatctggtcagcgttaacctcataggttttggcaatggcctggacctcaccgctgaaatcgtacttgggatggctttcgtcatattccgtgttgatataggcatccaagatggatttgatcaagtatttgccgctgcgactctgggcaaactgttcctctttggacaggtcggaaatcaggtagaaggtaaagccggccccctccaggtcgataccgtcggaacttccggtgctggaaacgtgcttggaaagctctacgttgcctttcatcacctgatcctgagattctgccagctcattatcccggtgcaggtggtaatttgctctgtagattgtcgtgtcctgctgctcgccttcgccctgccggttgtcctcaaaggcggtcttttcgatgtaccagccctcatcagcataagccggggtaatgtaatagttgtgctcatcgcaaaggtagccggtggcatagctttcgtagtagccgtcgtaggtcttagtgccgtccagtgccttgctctggccgatgtacgaccactgatgcttgtacacatagtcggtgtactgaccctgtccgttggtagccaattgcgacatagtgcctgtcggctccttggttttggaatccacatcggggtaggtgccagacaacttgtaatcaccgccctccacggggatgaccacgccggtgccacgctccacaatgtagtatttgcccagatacaagttgctgaaggtcagccaaccgtccttgatcaccgcactggctaccagatggtctttggccagcaccggcaggtagtcatccacccactgaccagcgttatcacgaatggtcgtgtgccagatgggggtgccgtcggcataggtgatcttgctgtagtccaccgtgccggtaacaccgtcagggtgctgaatatcttcggcggcatacaggtcatacacggcaccatccagctgggcgtcagcgtgggcctgaccgctggccatggcatcgccatcggtatcacggcctccgacatagcgcacggcatccaggtccactttactgagggagatttcgcccagcgaacggtcattctgcatgacaccttccttcggagtcatggtgtaagaatcctcattggctgcagttcccgagttgtcggtattgtagacacggcctgcatcctgatactgaatctttgctgcgggttcatcactggccttgtagatggtcacggtggtctccacaccgcccgaagtcagcagcttggtgccgcccgtataactggtggcgatgtcggcgctgtaatgggtattgtccagcgtgatcacgctgccgtcgttggctttcgtaatttcaatgtaatacgctcgtttaccaagcggtgtacctgcggtgccgggatgttccacatccgtccagtcgccgtaatagccggagggggcgcgtgtttccacgatgatgaactttccctcattgcgctgggtataatacatcttccggctggtatcatattcggttccatagtccgtaccgttggccaccgagtaggtaccatcctcattgcgaacaacggtgtattgattgtagccgccgaacggaatgtactgttgggtgacggtgtcccattcgtagacctcatacagtgcgtccccggtgatctgctcgccggtctcgctgtccacctttttcagattgacctgcaggctccactcgtcattcttcatgacatagtcgttggaactatcggcaggtacagtgatggtctggtggctgccaaggctgccattgaattcctcgaagccatacgggatctccacttcatcgtaagagaagcggatggttgccagttcagcgcgggcggctgcaatggctgcatccacccttccctgcgcctcgttcttcagctgggaaatggcggcgtttttggctgcttcagccgccgcatccgcttcggcctggctgctgaaagggccttcctgaccgctgagtgttgtggtgctggttttgctgacttcatagtgcaccgtccagcgcaccgtgccgtcaccgccattgttctggtagttgtcatcgttggtatggccgctggtggtgatggtctgcgcaccggcgggactcatttgccagctgccgccgtcgatgctgccgctggttttggaaggagtgacggtgattttagcaccgtccaccttttcgccagtctctagctgctgtttatctgcattgaccgtgaaggtcaggtcgaagctgccgctggcgctctgcgccggggcggtccagttggcggaatagtattcggtgtcgggcacatccgggatatccgtaccgccgccttccgaaatttcttcccccacaatggcaacgatctgccaggcgtacccggcaggcgggttgtagatataggtgtaatacccgttttcgccggaataggtagccgctcggttctccgttccctgtgcggccaacgcctgagcagaggctcggtaggactgagcagccaaactgttcgggtaattggccatgatccaaagctgcacgtcatcgtagtagcggtaggccgcagcttcggtactttcgctctccaacccataggtggaggccgaagttccactgtgcttttcttccagcaggttcagcgaaagctgccccaagccaccccagatattcacctggttggcatagtggttaccgggcgtgtattgcccaggctccagcttggatacataggaaaaattgtaggtggggcagccgttgggctggccattcaggccgtggctgcagcagtaagcctcgatgccgttaaaccagatcagccaggtgccgccctcgaaactgatcgaagtgattttgccggtggtaaacgggggtgtaggtccggcagcataggtgctggcaccagcattggctgcggctttggcggtttccttgctctcccccagtttcacctgcagggtcttgcgcaattcgcttccatctggcccttggtagacaaactccaccgagaaattctgcttggctttcacatagaaaccagacgcagtggctgaagtttccgtgtagctggccttagtgatagatgcaatttcatctgcattcgccgggtccccttcaaagtccagaagaaccacatcttcgggcaagaggatctccgatgtgctgccgttggcgggatactcgacctgcaccatcaggggaacaatggcatattcttccccgggttcccggttcactgtaatgaccagattatccgcatgaagggcttccgcatcgatatgggcatccacaccgtcatacaggtctgtcacccattccgaaatggaaattcgggtctgaccggtggcaatgggcaaccccatactgccgatataactgccggtgggtgcgtccggcagatcatcgtaaagcatctccgtgatctcggccagatccggctctccacctgccccggtggcaaccgggttttccatggcggcgtaggtggctgccagaatcgctgcccacacagcataagcgtcctgcacacggtcatcgctgcgttcggcttcggggatctggttgtacagatcctctgctgcatacagcggtgcgcaggcttcctcctgtgcggcaatggcttcgttgagcttggactccagtacggcgttgtccagatccgccatccatgcctgatgcgccagtccccaatcattgctggccgccaccatgctgtcacgatccagcgctttgacggcatccacaaacgcctgggcctgttcgctcagcgaggctgtgtcagcggtttccgctgtttcggcggtagcctccgtggtttcttgcgaggggggtgattctgcaaaagccagagagccgctcagattgctgaacaacaaaacgcctgccaacagcagtgccacgccccgtttccagagtttcataaaatgattcggcataactgtctcctttattacaactgcattatcggtcaccgttcctgctgtcttttcggcttcggccgggtctgtccttccaacggctctaccgcccgcccgggttccgggataaaaccacccaaacggttcggaacataatccgaaagccaggtgccaccgaatgtcgcatgggtctgtaaccgccacatggcaagttttccgatatccagcgacacaccctcaaagggatagaacaaacaggtcaggccctcattcttaaaggatgagatattctgaaacttggtgccatctttcaagatgccattttcggtaaacatttcattgatgccatccaaccattcctgcaggtcgccgccgcagccctgtaaaaccagaccttcgcggtcgctcatgcggcgcaaggcatcggttgttatagtgctaacacccaagataaacgcccccttccctgtaaaagaaacaggccctcgccaggaaggcgagagtctgctccggtttccatatttcgggaattactgtattatctgccggatatttgttgctttgaacacttttccggcggatggcatcgccgtacttccccgcgacagcgctccaaggctttcagaaccggttcttggggaacccctgtctgacgacacccttccaaaacagtattcagataattccctccgggttcctgcggccttgcacaccaaggttcctccatgatatagatcaacaccgcatgtcctgttccggaagcatcctgaacggtgacggtttcctttccatacaaccggggaaatccttcataacggtccagatgccgttcgtcttgctcactgatcgaccagatcagaccgtccacatgggaatcttctttcggcagtatcgtaagaacaccgcctcggaaggccagttcatacccttccagccgtgcgatctgaactgtggtagactccgggcaccgtccggccatttggcccagattcaggttcgagccgtaggcaaaatattctttcatggttttctttcctttcatcgggcctcatcccgtgttcgggcccttgtctgttgctgtgcatagtggctcctgtcgtaacgccaggctttgtcaccgggcaaatgctttaaaaggtgcatacgcacatttttgaattccggaccgatcagccccagacgcagcaaaaatgttcgcagcgtaaatgccgggttgtccccgatgggcgtctttcggaactgggtatacttttggttaatagcctgcgcagaaatagccagtgccagaatgatattggccttcacctctcccgcatgaagcgtggagttaaaacagcgccattccagggttccatggtagaagaccgaatgcagattcaacgcatggtaacgggtctggttatagtgggcgtttctgctgtcgtaacaatctgcgtaccacagatcggccatcctgttcatgcccgcccaggaaggcagcttgcgaatcttcatcagcttgtctgcctcgaccttcttgcaccatctttcaacacggctttcgtttacttccagagcggcaaacaaaatatcctctttggagtacatgatagacaatgcatttttcaggctttgaggtgtgtgatgcgcagcgtccacatggacatgcataccacagctggtgttcacaattgctcccgcatggcgcagggtccggatgacctgctgaagtttttccatctcgctgtactgcaggacaggcgaattcaattcaaccttgtatagcgtatcggtggtggacagcctttcccgcccacatcgtttgaccgcgctgatactcccatcgtaaacaaagcgccattttttcccgtcgttatcgagcacttcccaaggatcgtaggtcacagattcccgcgttcttcttgccgaagttccaaacagcgctgcaacagccctcgctgcctgttcacgggtcagtcccgtcatttcgatttcacagccgtaattttgatctttgaaatcaagggccaggcacctcacctccgtaaagttctgcatccagagctgccagccgccgcccgataacttccaccacgttgaccgtcacgccgttcccagcctgtttgtagacctggttgtcactctggatggccaacaccttgtcgatgcggtcatccgtccagccctgtaagcgcaggcactcccgtggggtcaggcggcggatgcggccattgcacagcaccccggaagcctctctcttatgcttgcgaatcccgccattctgctttgcggtcaggcagcgggcgatctcggtagttttgggatcacggttcatatcgatgaagcagagagttccctgcgtcgatcccgtggtgagggtgtgggcaattttgtgccccacccggccgcggcgggtgttggtgctgtagtagctgatatcgatgctgtctccttcataggccatcttgtagcctttccgggtcgcttctttgatgggcaatcccacgcgccctccgccccctcctgcttgggcagccaaggtgcagcttactccttcagtggaatagactcgctcgccctgggctccccgtcggatttgtgcaagagcatttcctgttgtgtcggtgaaaggaagtatttttcctctacatcggtcatcaagatatccgacaagatacaccctgcggcgggactgggggacgccgaaatctttgctgttgagcacctgccattccacgccataccccagtcggtccagcgtatggaggatcgtcgcaaacgtccgtccgccgtcatgagaaagcaggccgggtacgttttcaaacagcagatagcgaggcttccgggcttcagccagtcgggccaactcgaagaagagagtgccgcggggatctccgaaccctcgtcggttgccggcaaggctgaaagcctggcaaggaaatcctccgcagagcagttcaaagtcgggcattgtttcgggatcggcttttcgggcatcgtcaatgaaccactctccctccgtgtcaaacagggcgcggtaactgcggtcggcgtatttgtcgatctcgcagtgtcccatgcaaacaaaatcgccagctctggtcagcccctcccggaaaccgcccatgccggcgaacatatcaatatagtgaatggtcttgcgcatcctcccccttccagatgatagtgttgttatttagagcacaagcaaaggcatccctcccttcaaatggatatgaaaaaagccctgcaggtttttgcctgcagggctggtcgctatgtcttattcttctattgtgtaaggcgcgtgactttcgccatttcccgattcctcatccggggattcaccgctgtcatcttcgggggcatcgctttcatcaacctccccggtgtcaggctctctgtccagcgcttcttcctgctccggagcttcctcttctgctgcggtggcggcctcgaattcttcctccgcttcgctcagggcgtcctcgatgagctggagcatgaactcccgctgggtcagctttctgccgtagacttcctgatagcgattgaggtactccttgatacgctggtagagttcctcggatacctggaatgcgatggttctggttgccatgttgttttctccttccttgcttttcgtgaagtattttgtgaccaccatctcgatgaattggccggtggtgatgccctgttcttccagttcctgccgaatctgtgcgtgcaggtcgtccggaagcgttaccgtcagtttgctcatgctgtagctcctttcctgtgtttctgcctttgggctaagcaaagcatactgcaaacgcatcggtaaagccattcacaaaaaccaacgatatcacatccaatatcgtgttcagaatgtatcataagcaacaatggcaatccagtggtcagtcgcaaagggatgctaaaaaatccagcgtttgtttaggcacctctttctctgcagtcggtttcagaggctcctgaatcacgacaccacgagcgagttcttcccggatcacttcccgcaggatctgcttgaacgcatcccgttgttcctcggccatgatcgccctgaccagaaaatctttgcgctggtttggcggtatctgctgtagcagagtccaggctcgccgatggtctgggatgctgagctgtggccggaaaacgtattgtggccgtttcacccctcgctcaccgcgccctgaacgcggcccaaagcgcgctcaaaaccgatagcgttcacccggtcgtcctgcagcggaataacccgacacaggccgtctttggggctgacgtggcggtttacgatgcaggccccgccgcccagcatgaccagcggcatggcgtgcagatcgaagcccgcttccatgaccgcagaaaacaaacgctcggtatacagccggccttgcttgttcacgatgctgcgcacctcatccgccaggctgcagggctggcccgccagcatctgttcgatctgggcatcggtgagcgaaagtccggtttcctggcggacccgctcgcggatctcatcgatgcagcggatcatccccagttccagactatgcgccgtttccgctaccggcagggcgttgtcgatccgcatcagatccaccgtccagccgccgatgtccatgagcagcagcgacggttcgtcggtcagcagatccggctcagccatcagggcggcaaagccctggggaaacagctgcacatccgcgatggtgatgctgtattccacaccctcgtagcggaactggaccggctgggaaggacgaagcagatagctgcggaacttcggcttgtcccggccatagctggtcagcggcagacccgccgcaatccggaccgtacactcagtgggtgcgccccggctgcagatttcttgcgccaatgcagccatcgtcagcaggtagtagttgtcgttgatggttttgtcgcgctggatcggctgccgtccggtgccgcaaacaaaaaaacacccgccggactcaaggagtccttggcgggtgtaaggttcgtgattgccgtaagctgtaagaccggctgggaaagaacaatgccgcgtcttgatggcatagtagccgtgatcgatgccaatgttcatggttttgcctcactttcgtttttcgttgagatttgcgaatctatgtaaacggctggtagataacttttcttcccagccggtaaatttatactagggggagaggtgtggagagggggaaaagcaaaaggccgctcagttccggcattgccagaaaccgagcggccaaaaatgggcgcacttgtccctacaaatttcgagcttaagaatactctactctgtacggttttctcatcaacatacgtcttagttttactttttgacccttacagctttttgcgggataatatcccttatatgatactgtccaatatcatttttatagattacaatctttattgttttcatgtatttatcaccataaatattttcataagacatattcaatttgtagtattgtgcaatatcgtgcggttttatttgaaaattaaaactaatcctttcgtctttgagaatagccaccacatttcgtagtaaacccattgggggttcaaaaacagtaacttctgtatcattgtatacggcaacgacattatcaaaattgaacttcaaaaccggctgattaaccgttcgtaacattacatataaaaccggtcccccattgtcagtcaatttacaaaacatttcagatgtaatttttccactttgaaaaaacagatcatatgtctcaatcagttccaccaacaattccggcatattctgcagctcttcaagtttttcgttgtatttatcagattgttgtttataaagatggttttgccataatgcaataatgcctagtagcgctgttgctattgcactccaaagccccgataacatcgtaacaaaattaccattattttcataatcataattcaatgacattattgcagcaataacaactattacaccaattatcgctattttcacaaatcggcacactgtttttttcattgtatctccttttaaagcttcatcgaaaacgattgcaaacatttcactcaaagaagcttgcaataatacaatagttagattatatcacgaaacaaccctatttgtattctttaaaaatatttatccataagttcttctttcactaatttagtttcatttggcaaaattgagaagcacaaaccatgtttgggtgcaaaactcccaaaaagaaaagcctgcatataactaccgttacatgcaggctttatcactttggtgcaccatcggggactcgaacccaggacccactgattaagagtcagttgctctaccaactgagctaatggtgcatatgaggattttcggcgattcagcgtcaaatcctgttttgagaagttcagcggcttccagccttagtattggctactaacgctaccagctgagctaatggtgcatataagcaaacttcggaccgggcctaagctcggcccgaaggctgctttttaagagaagccggcatctacctattttcacaggtcgtttccaaccaactatcgtcggcacaagtgagcttaacttctgtgttcggaatgggaacaggtgggacctcaccgtcatcgacaccggccggtatacaatctttcgat

SEQ ID NO: 36 - DNA, 407700 bp, Gemmiger sp.
  source 1..407700: mol_type = genomic DNA
tcccgcgccgtcaaccgcctgctgaatcaggagatccgctgcgccgtggcccggggcatgacggtgctctactgcatcggtgaaaagagcgaggaacaggacaactgggagcaggttttgggcgagcagctgtccatcggcctggaaggcgtggacaagtcaaaggtcgtcatcgcctacgagcccgtctggtccatcggccccggcaagacccctgccgacaagccctacatcaccaagatcgcccgcttcgtcaaggagcagaccggcggcatggacgtggtctacggcggcggcctgaaatccgacaacgccgccatgctggcctccatccccgagatcgacggcggcctcatcgccctcacccgctttgccggtgagatcggcttctaccccgaggaatatctggagatcatccgcctgtatctgggcaaataaatccgccctaccacaccgtaaaacaacaaaggagcgttatcatgaagcattttgagtttgagtacggcgccggcaccatgggtgcggatctgcccgattccaccgacgaattcatccccggcatcacggttcccgacccggactatatccccgaggacaagctggaagccgcttaccgtgagagcctggaccatcccatcggcatgcccaccgtcaaggagctggcccacaagggcagcaaggtggtcttcgtcgtgcctgaccgcgtcaagggcggcgagcagcccaccagccaccgcaagctgtccatcaagtacatcctggaggacctgtacagcgtcggcgtggagaagaaggacatcctgttcatcatctccaacggcctgcatccccgttccaccgacaaggacgccctggccatcttcggacccgagctgtacaaccagttctggcccaccggtcagatcatcagccatgactccgaggacgccgaaaacatggtggacctgggcttcaccaagcggggcgaccccgtgtggatgaaccgcatggtctacgaagccgacctgcccatcctcatcggccatgtcaacggcaatccctacggcggctactccggcggctacaagcacagcgccaccggcatcaccaactggaagagcatcgccagccaccatgtgcccgccgtcatgcaccgtgacgacttcacccccgtcaacaacggcagcctgatgcgcgacaagttcaacgagatctccatgcacatggaggagaagatgggccatcccttcttctgctgcgacgccgtcctcgactccaagagccgccagatcgccatcttctccggctacgccaaggaaatgatgcccgagagctggaaggtcgccgacaagcgcacctacgtccactgggcggagaagaagtacgacgtcctggtcttcggcatgccccagaagttccactacggcgacggcatgggcaccaaccccatcatgatgatgcaggccctgtccgcccaggtgctgcgcttcaagcgcgtcatgagcgaccactgcgtcatcatctgctcctctctgtgcaacggcttcttcaacgatcacaagtggccctacctgcgtgagtgctacgagtggttccagcatgaccagatgaaccagctgcccgacatgaaccgtctgggcgagtactttgccaccaacgaggagtacatccgcaagtaccgcttcaccaacgccttccatcccttccacggcttctccatgatgagctgcggccacatcgccgagatgaacaccagcgccatctacattgtcggcgccgaggacccgggctatgcccgcggcatgggcctcaagacccgcgccaccttcgaggaggccctggaggacgccaagaagaagtatgtgggcgagaaccccaacatcctggctctgcccctgaccttcaagaccaccagcgtccatctgtgcatgaagaaccccgccgacgactgcatggacgagtacggccatcgccacggcggctgcggctgcggctgaaaggaggccgcccatggccggtaatcttctcatcgtgcacggcggcggccctaccgccgtcatcaactcctccctgtacggagccatccgtcaggcccaggagtctccgctggtggaccgggtgtatgcggccatcggcggcaccggcggcctgctgaatgaaaagctgcgggatgtcaccgacattcccgacgcggaactgcgcgggctgctgtccagcccggcgtccgccatcggcaccagccgggacgccctggaagcccccgagtatgaggccatggtgcccattctcgagaaatacggcatccgttacgtcctgatgaatggcggcaacggcaccatggatacctgcggcaagctgtatgcccgctgcgcccagcggggcatcaacgtcatcggcatccccaagaccatggacaacgacctggccatcaccgaccactcgccgggcttcggcagtgcggcgcggtacatggcgggcagcgtggcggaagtctgctgcgatgtggagggtctacccatccacatcgtggtggtggaagccctgggccgcaacgcgggctgggtcacggcggcggcatctctcgccagcgacagctatgcccacggccccgacctgatctacctgcccgagcgcgccttcaaggaggaggaattcctctgcgacgtagagcagctcatcaagacgaaaggccatggcgtggtggtggccagcgaaggcctgcattacgccgacggcacccccattgtggagcccatcttcacggtgggccgggccacctacttcggtgacgtgtccgcccatctggcgaacctcatcaccaaaaagctgggttacaaggcccgtgcggaaaaaccgggcatcctgggccgggcgtccattgcctggcagagcgagaccgaccgcgccgaagccgaactctgcggccgtgcggcggtggatgccgtcaccaccggccagagcggcaagatggtggctttgcgccgcgttccggggcccaactaccgctgcgagaccttcctggtcgacatccaggaggtcatgatgaccgagcgcaagatgcccgatgagtttattaacgcccgtggcaacaacattaccgacgctttcaaggaatggtgccgccccctcattggcggcccattgcccaagctcatggacctgcggcccgatcagaaatgatgccgcgctcctgctgactaccctgcccgccgggtcacccccgactacaagctgatttgcacggcggacaggcagtcccatcctctgcattgccaaacggaaaagccgggacccggccgctctcccctgcgagggggcggcatcgggtcccggctttcttttgttcatacaaagcaaaaccgcccggctgcgggggcattttccctcgcagccgggcggtcattgtatcatcagcgtctgtgggccggcgctcaatagcgctcacggcgggccatccagtcctcgcacaggtcgcgggcttcctccacgctgcggcagacacaggagaagaactccccgcgctccgaacgataagaatactccacccgtttctggccgtttttgtttgccgcaaagggaacacagcgttcctggccgggcagcagatatgcaacttccacaagatcgcccctctatatattgtgatgctgccggccgtattttggcccgcaacggttcctatcttatcacagcggccgctttttttgaatggactttcggcacgccccaaatcccgcggggcagcggcgtccgcgctcccgttccttgcattattgttgccgaattgcccccttgccggtttttgtgcgttgtttttgtcaaaaacgacggggaaaatccggccttcccggcccccttttgcggcggggataggctataatttgatcagaaccttcccccgaaaggagccccgccatggaactgtcccaaacccgggtgcgcgccctgcgcctgcacgcccatcatctggacacgcccctgcccgccggcgggctgctgcaagccgcggcggcctgcgggctgcagaattccccgcccggcgcgtgggagaccgcagccttcaaccgggtggaggactgctcggtctgctcgctgcataccgccctccaccacgacaagaccctgctccaggcgtggagctaccggggcgtgccggtggtctttcccacccgggacgccggggtgttcctgacgccgctgtgcgccctcccgggggaggccccctggatctacaccaagggcatcgggctggcgctgaattttctgggcatgagctttgaggagctgctgcccctagtgcggcaggcctgccgctgtctggacagcgagaccgtccgcagcaaggaaagtctggaccagcgcctggccgacgccgcccgggacagcctgcccccggacaagcgttccctgtgggatgcccccaccatgtacgggcggcccgaccggcagacggtgggcggggcggtagtatcctttctgctgcggccctgcgcctttgagggccgggtggtctttggggagcgctgcggccccacccccaccttcacctccatggagcgctggctgggcagtctgccgcccgccgtcccccacggggatgccgagctggtccgccggttcctgcactgctacggccccgccctgcccggggattttgccgactggctgggggccagtcccgcccaggcggcccggctgtgggacgccctgcccccggaggaagccatttccgtgacggtggagggcaaacaccgccggatgctggccgccgacttgtccgccgccgaaacgctgccggcccctgacccggaccatgtcctgctgctgggcgcccacgacccctatctggacctgcgggaccgggggctcatcctgccggataaaaagcggcagcgggcggtgtggcggacggtgggcaaccccggcgtcattttgcagggcggctgcgtggcaggcatctggcgtacccggacggcgcgaaacgggctggagctcaccctcaccccatgggaggagccttcccccgccctgcgcgcccggctgaccgaactggcggaacgctacgccgctttccgtctgctgcccctgcgcaaatgcacggtggaggccgggtgaccccgacctttcccgaaggataaaccgcaaacaagcggggcctcccgaatcaggaggccccgcttgctgatgtatggaatttagaggatgtctgttttagcgtgcggtcattccgctttctgtgccgcggcggtattcgccttcttgcggcggatggccagcaccagcttgacgatgcacagcaccgtcacaatacccagcacaacgtccagcacgatcagagcgatctgccaccacggcgtgacggagacgatctcggtctcagcggtaaagccgttcatggcgttggagttggccacggtgtaaaggatgcgatgggtggcctgacgcatagcctgggtcaggtcgggatcgccctggtacaggttgatgaggtcgtcggtccactgctcggcgctggagtcccagctgtcggtgccggccatcaggccccaggccacgtcaaagctcttcatcatgatgccgtaggcagcaaactgagagttgccggagaagtcggtcagtgcgaagccggtcatgccccactcgccgcgcaggacgttggtcatcaggcccttgtgcgcgccggaccaggtggcgccgaagcgggcaaaggagttcatgacgttcttggcgccgccctcggtcaccgcgatgcggaaaggctccaggtaaatctcacggatggtctgctcgtcggcccaggtggagatgcagcggcagtggctctcggtatcgttgagggcaaagtgcttgatgtagacgtaaacgcccttggactggatgccctggatctcggaagcggcgatcttgccggagaggaagggatcctcggagtagtactcgaagttacggccggagtaggcggtgcggtggatgttcatggcggggccgtacaggccggaagcgcccagatccagcatatcgttgccgatgcagcggcccacttcctccatcagttccacattgaaggtggcggccatgatgttctcgtcagaataagcgcagtggcaggtggagataccggtcagcgtctgggtgaagccctggggaccgttatcgtccacggtagcgggcttggaaacggacagcatgcgggcggtgttgtggtagcccttgccgatgagctcggccatctcctcaaaggtgacctggtccagcagcagatcccagtcgggatcgtcgtaggccttgccgaccatcatgcccagggtcatgccgttgtcggcgcccatggtgggcatctcggtggtggaaccgtccacaccgtcgtaggtctggtagaggttcaggtcagccaggatggcgtcgttggcagccagctcaaaggtctggggccaggtgccctgccagtcgctgcgggacagggtggtcatggtgtcctcaacgccgtagtattccaggctggcgttgtcgaactggttggtgatctcagcgccggtggcggcggagacggagtaggtctcggcatccagggcggcgttggtgtacttgtaggtcatggcggcatcaccggcggcggtcatgccgttttccacggtgtagcccttggcggccagaacattgttgacggcgtcgtgggcgtcatgggcggcggtcaggtagtagtcaccggcgtccagaatgtaggtcttggcggtagttgcgtcgtagcaggtcagttcggagcggggcacggtgatggtgaccgtctcggaagcgccgggctccagggtctcggtcttgtcaaagccgcacagctccacgctggccttttcaatgccgttctgcttgtcgtaatcggtatagggggactggaagtagacctggaccacttccttgccggcaacgctgccggtgttggtgacggtcacgctgacctggaagctgtccgacgcggcgtcgtaggtggtggagaatccggaccagtcaaaggtggtgtaggacaggccgtagccgaagggataggcgaccacagagttgtagtcgtagctgccggcattgccctggcccatgaccacatcctcgtagcgggtctcgtagtagcggtaacccacgtagatgccttcctggtaggcgatgtagtagccgttgccgtccagaccgccgttggccacggagtaccaggtctcggtgtcggcctcgtcatagttggagtaggcctgggcataatagcccaccaggccgggggcggtggtgttgtcgtagcagtaggtgtccaccagcttgccggaggggttgacgttgcccaccagaatgtcagcaacagcgttcaggccccaggtgccggtgtagccgatccacagagcggcatccacaccgtaggcaggatcgttgaggaagtcgcactccagagcgttggtggagttgatgagaacgatgaccttgtcaaattcctcgttggccatcttgagcatgtcctgctcttcctgggtcagtgccaggacgttggtgccgtcggtgtagtcaccgtattccaggtcggcgccttcgcccgcaacgcgggagatggtgacgatggcggcgtcaccgtactgggcaaagctggagcggacgtcggtgatgccttccaggccggcggcgacctcagaagcactgacgttggtgccgtaggcggagacaggcacctcgttgatgtgccaggcggcacggtcgcccaggctgacgcccttgccgggggaacggacgtagtccttgccggcgccggtggtgtagaagtcccacaggacagggttgacttccaggccgacttcttccagcgcctccttgagggtgggcgcgttggaggtatcaatgtccgcagagccggtgccgcaggtcacgatgtccaccgaggaatggctcagggtgctgaccttgctgcccgcagccaggggcagtgcgccgtcgtttttgagcagaacggcgccctcgccggtaagctgctcggcgatctccttgtcgtgggcttccagttcttccacgctgtcgaaatcgctttcaaagtagaccgcctcgtcatcggtgttcttggtggcaaaggtggaggtctgcagggcgatgtttaccgcctgcgagctggcaaaggccagctgggtgccgatgcaagccgccgcaaacaatacggcgaacagcaccgacaaaacagagaacagcgcaataccgctgcccttcttttttgctttgctttccatttttcttctccttacatcatcaaactgttctggcggaccgccatttccgccaaatgtcgatgtcaagtgtaaacgtttcttttttccgcttcaacctctttgcgaaaagcggtcgccagggcgggataatcggtttttggcacacaaaaaaggagccccggtcttgtgcattttgcacaagaccggggctatattttcagcattataacgtagtctctcctaccgggataaccacccgcacggtgagcacaccgtcgttcacatccacgttcagcataccatcgtaccgccgcacgatacgccgcacacccttgaagccaaacccctggagcagtgtggcgcggcgggcccggggcaggccgtcctcaatggtcagcttgccgtaaaccggattggatacattcaccacaacaaaatcctgcctgcgacataccaatacttccaccaaacggcggtcactgtccgcaaaggcggagacctcctcaatggcgttgtccagcgtgatggaaaacaggccgtacagatccgcggcttccagaaaatccagggctgtaccgtcagccacgcaggtcaggcggatgccccgctcctcacatagcaatcccttttcggtcaggacggtgttgagcacctcgttgccggtgcggatcatgccgtcatagttgtcaatggcctgttccagctctgtgtcgggagcgccgcccgccttgcgcagggcggccatctccattttcagggcgtggcaccggcggttgataagctgaacactgcgccgggcgttggcatactgccgtttctgctggtccagcagcaggtttagggtattcaattccttttggatggccgcttttttgaacagttcgttctgcaggtagagtaccgtcagacagtaaaactgccccaaaacagcgggcaagacaatgttgtcctgccaagcggtgaccatcaggccctggctgagcagttcaaacaaaagggaaaacagcagtgccagcagtcccgcgctgatcagctgcatggcactggggtcatagcggccgttgttgggcatccaccgggcggcggtgaaccgcaccagcagataaaccagggtgccgaacagcacctctacccaccagaactgccgccagggcagggtgccttcctccagtacgatgccctgcacggccatccaaagctcatgcacacactgggcagccacggtgctcagcaccgcacagtaagcggcgcccagggcagacagctttgcgcaggaaccggccagaaaggtaagtaccacccacatcaggatgcgccggggcatggcccacatatcctgccccagaggtgacagtaaaagcgccgccagtacgcatgcggcgatcccggccactgcgcggatggcatacttgccccggtggcgcagcgggtcaataaagcacatggccgcctgccagtaaaaaaggccttccagcagaccgccggcaatcagctctcccatcacgcaccgcctcccacaaaggcggccaccgccgccaggaaagcggtcttgcaccggcggctgatctccagggaatgtcccgccaccgtcacattatcccgcacgatgccgctgacataccgcagattgaccaggtagcactggttgcagcggacaaagttccagggggccagttccttttccgccgcggacagactgccccgcagccggaacactcccttggccgtatgataatagagcatccggtcccgggtctccaggtaatagatctcctgggtgtccagcatctgcataccgtcggccagctgcaggcagacggtgtgccgcgcctgctgtctggcccggcgcaccgcccggtccatcttgacgctgaaggtaaaataattcaccggtttgaggatgaagtccagggcttccacctcgtacccctgcaccgcataccgggcaatgttggtgatgaacacaatgaccacgccggcgtcccgctcccgcagggcgcgggcggtctccatgccgtcgctgccgggcatctccacgtccagcagcagaatgtcgcaggtggtgtcatactcccgcagcagttcgtctccgctggaaaaggcccggatgtccgcctccagctcatgctccgcggtataccgctccaaaaactgccgcagctgggcggccatggcctggtcgtcctccgcaaaactgatatgcagcatcctttccttcctcccctgctgcaaactcaaagggccgcaccgcggcacgcgcggcgcagccctgctgctgttattatacatggaaccgccggggcatttcaaccacgggacctgccgtggtgtcagcggcggtactcctcgtagacaaagcgctccagggcggcaaagctgcgctggaccttgtcggtgtcgatgcagtatgccatgcggaaataccccgggcatccgaaggaatcgccggggaccagcaccagatcgtagcgggtggctttctggcagaaggcatttgcgtcctcctccaatgccttggggaagatgtagaaggtgccgtccggcttgaccaccgtaaagcccaggcgtttcagttcggcgtagatcagctccatgttcttctcatacaccgaaagatcgctggtcagttccaggcattccgccaccgccagctggatgatggacggcggacagttgtggccggtcccgcgggagatctgcccgcacaccgggaccatcttgtccgcctgctcggcggcagggttgaccgccacatagccgatgcgctcaccgggaaggctcaggctcttggaaaaggaataacaggtcagcgtatccgcgtagtatttggcggggtagtcgatggtgcgcccgccgaacaagatctcccggtaaggctcgtccgagatcaggaagatatgccgcccgtatttggccgacgccgcccgcagcacctccgccatactggccagggtctcgctgctgtatgccgcgccggaggggttgttgggggtgttgatgagcaccgcggcggtatcggggccgagggccgcttccagcgccgccaggtctacctggaaatcctccacccggggcgggacgatgtgcagtttcaggcccgcaccctcgatgtagggtttatattccgggaaatagggcgcgatgaccacgacttcctcccccggccggcccacacagcgcagggcgtgggccagggcccccgccgcgccgctggccatgaagatatgctcggggccgtactccatgccgaaacggcggttcaggctttccgccactgccttgcgcaccgaggtgatgcccaaagacgggctgtacccgtgcagttccaccgggcgggcggtgtgcagcaggtggatcatggtctcggtaaactggggcgggcagggtacgctggggttgcccagggagtagtcgaacacattgtcgtagccgatttccgcgccccgggccgtggcccattcgctcagagttcggatgacggattttgcaccaagcatgtcaagatattgctgcgggatcatcaatacaacctcctttgtctgccctccggcaggcctcacacagcccgccgggcgatgaacggtcaccgtttttccgccggggccgggtcaggcgtcctcgcccagaatgacccgggccagctcatcggtgtcggcggccagatactcggcccccgcctcgctcagttcctcccgggtgcggaagccccacagcacgccgcagcagggcagcccggcatttttggcggtggccacgtccacgttgctgtcccccacgtaaagggtggtagccgggtcggcgccgatctgctccatcagggcaagggtgccttccggggcgggctttttgggcacgtccgcaaacgccccccgcacctgcacaaagagggacgggtcaaaatagtgggccaccacgccccgggccagggcatcgtccttgttggagaacaccgccagccgcacgccctttgcgtgcagggcggccagcagctcgggcatacccgggtagggcgcggtcttgtcgaacatatggtcatggtagtcggcgtcaaaatcccggtaggcatccgccagcacctgctcggtgcggagtttctccggcgtcaggcgctcgatgagtttgggaatgccgttgcccaccagatagcagaactgggcggtggtgtgggtgggccacccccgggccgcgcacaaacggttgcccgcgtcggccaggtcctcaatggtgttgagcagcgttccgtccaggtcgaacaaaacggtttgatacatctttcctttccccttccgcggcgtgcatccaatcgccccgccgctgtgtacctattatagaagcattttgcaaaatcggcaacgtcccggtcgttttcttggtaaaggccgtccgaccggtttttacaattttacatctttcccgccgggaaataaagcgtccggggtttccttccgtcaaatctgtgatagaataggaacatgcactttgcaccatacaggccggactcggcctttttgtcctttcgcggcatcacgcattacagggggtaagtggaaatggaatttttgttcgagatcctcaaagccgtggcctacggcgtcattgagggcgtcaccgagtggctgcccatctccagcaccggccacatgatcctggccgagcagatcctgcagttcaatctctccgccgatttcatggagatgttccgggtggtcatccagctgggcgccatcctggccgtggtggtgctctacttccagaaattgtggcccttctgccgggacaacggccgggataccggcgtggcccggtatgtgcgctggcccatcatgcgcatgtggttcaagatcatcgtcgcctgcatccccgccgccgtgctgggcatcctgctggacgactggatggacgaacacctgtataacagcatcgtggtcgccctcatgctcattgtgtacggcatcgccttcatcctgatcgagcgccgtccccgcccgcccaaggtcaccaaactgtcccgcatcacctacaaaaacgccctggccgtgggcggctggcaggtgctgtccctgatccccggcacctcccgcagcggctccaccatcctgggcggcatgatgtgcggcttgtcccgtccctgcgcggcacagttcaccttctttttggccatccccgtcatggccggcgccagcctgctcaaactggtcaagttctttgccaagggcaatgctttcgccttcaatgaggtggtcatcctgctggtgggctgcctggtggcttttgtggtctccattgcggccatccgctttttgatggactacgtcaaacgccacagctttaccgtgttcggctggtaccgcatcgtgctgggcgtcattgtgctggcggtctgggccgtgcagcagttcaccgccgtccccgctgcctgacgttaaaacgaagatttctttttgcgccccgcaaggtgcctgtcctgcggggatttttttgtacaattcgccgtctgccctgctcttgacgtgccgcacgcctgccgctatcataaaaacagaaacaaacggcggtatcaccgcgcagtatggcggagacctcatccgggaacccctgtccctgcatcgcaagcacaaaaccagcgctgcagcgtgtttcagggatgccatgggcgctccgctgtggattggagggtttgaccatgacgtttgaagatctgcaggagatcctggccgagcaattcagctgcaccgtggaggatctgaccgaagacaccgacctctttgatgatctgggcgcagacgagctggacatcaccgagctggcctggaacgtgggcgagggcatcggggaggaagtttccgacgaggaactgcagtcctgccgtaccgtgggccagctgtggcagctgatccaggagctggaacaggacgccgggctgtgaccggctttgccctgtaaaccatgaccgtaccggccgttttccccggcatttgccgtggggaaacggccgtttttttgtagttgccgggggatgcagggtactgccgcaggacgctccggggaaaggcgcgggaccatttttctgtacgcagcaacaccctcagtcggccggggcgcggcttctcccgccgggcggcgcacagagagtggcgaaacggttccgccctgtaagactctccccgccttgccgggcggtgcaaaatgcgaccaccgcctttcccgccccgccgctttcggcggcatttcggcggcaagcaagcatatttattcatatttttggcaattatgcaggatatttgcgtgtttttctgcatatttctcttgcaacgccgcccaaaacgtactaaaataggactatcgcattttgacgtcaccgacgtttttccccgccgccgcaaggtgggagtattccggcccaaccggccaaaaggagaccgaatatggatttcaaaggcagagattttttgacccttctggattacaccccgcaggagatcgcggcgctgctggacctggccgccgacctcaaggcgaaaaagaaggcgggcgtcccccacgatgtgctgcgcggcaaaaacgtggcgctgatttttgaaaagacctccacccgtacccgctgcagctttgaggtggccgcccacgatctgggcatgggcactacctatctggaccccaagggcagccagatcggcaaaaaagagagcattgccgacaccgcccaggtgctgggcagcatgttcgacggcattgaataccgcggctacggccagagcattgtggagcagctggcccagtatgcaccggtgccggtgtggaacggcctgaccaatgagttccatcccacccagatcctggcggactttctgaccctgcgggagcacttcggccgcctggcggggctgaagttcgtttacatgggcgatgcccggtacaatatgggcaactccctgatgatcggctgcgccaagatgggcctgcacttcaccgcctgcgcccccaaggcctactggccggaggaggctctggtggagcgctgccgcgccattgccgccgagacctgcgccaccctgacctttaccgaggaccccgccgacgtggccggggccgacgctgtctacaccgacgtgtgggtcagcatgggcgagccggaggaggtctgggcccagcgcatccatgaccttgccccctatcaggtcaacgcccagtgcatggccaaggcagggccccaggcggtgttcatgcactgcctgcccgcctaccacgaccactgcaccgaggtcggccgcgtcatgggtgaaaagttcggccgcgacgccatggaagtgaccgacgaggtctttaccagcaagcagagcatcgttttccaggaagcggaaaaccgcatgcacaccatcaaggcagtcatggccgccaccctgggcgcgcagttctgatcccggcgcagccccgctgccgccacgcccgacacatatgacttttccgccccgctttgccgcaataggcagaagcgcgagtgacataagaaaacgaaggttctgtaagaactgctctgcatcgcgaaaccgctgcaaggcggcagatgcaaggcagaggggcgaagcgctccttggtggaacgcaagacccgataacgcggcagatgccgctttgcagtcagagttttgcaactttgttttcttatggaaccgcgcagagcggggcgttttttgcggcttccctgccccgccgggcggccaaaaaaggaattgacgccccctgtaaactttgatataatattcaggtacatcggcgccgcacggcaccgcctgtatcaggagcattactcaagtggtcgaagaggtcgcactcgaaatgcgatagggcgttaacagcgccgccagagttcaaatctctgatgctccgccaaagccccggaagcaaaggcgtaatagtgataaggtactatttagctttgcgaggggcagagaacggtgtgaccgtaatggtcacgccgtttttctgcgtccaagggtagatttcgcaacaacaggctcggaaatcacaggaatctctacgtcatccacgaagttgaaatagattttcaccttctgtacccgcttgccgctggatttgtccggcgcaaacacctcaatcttcttgatatattcattgactatcgtaggtgtcaattccggcacatccacatacttctgggtcagggctacaaaggcgtctacatcagcactcatagtttcctgcgtttccagccattcttccgtcacttcaatttcgagttttaaccgttcctgttctgcctcgtaatcggcggtcattttcttgtaccgctccttgctcagatcacccaggacaaagtcctcataaagtcgggacagaagaacatccaggtcagccagccgtttcttggcctgctccactcgcttccgatcttcacggatgttgcgttcctgatcggagcggcggcattgcagccattcttcctgaaacccctccacgtcctgccggatataggtattgaccgcacggatgcgctccaacaccagttcccgcagtacatcttcccggatatagtgggcagagcaggtgcctcgaccgcttttgtagctggagcatacatagtggtcttgcttgccttcaaagctcttgcaggtagcaaagtgcaacttattcccgcaatcaggacagaacagaagcccggagaacaatccctgccgttccgcttttgtgggacggcgtttgttttttcgcagctcctgcaccctgtcccactgagcctgagaaacgattgcttcctgcgtatcagggaagatacacatatcttcaattgcattgggaatccgttttttcagcttgtaggacttggaataggtcttgaaattgcaggtacaaccggtgtactccatccgttccagaatacccgcaaccgattgaccaatccaatggtaagggcgttccggcatctttttccgctttttcgggtcaggatggttttccgactgtttggcatacagcgccttggtagtcaacaccttatccttctccagtatacgggcaatctgttccggccccttgccgtcaatagccaagtcaaagatgcgcttgactactggggcggcatcctcgtcaataatccaatggtctttatcggcagggtcagtgcgataaccatagggcggttttcccagatgctttccgctggtgcctttctgacggaatacgacccggacttttttgctggtgtcccgtggataccattcgttgaacaaattacgaatagcggcaaagccgtcgctgtcgccccgttcactgtccacaccatcattgacggcgataaaacgcacatcgtagctggggaaaatgatgtccgtgtactgtccaacggtcaggtaatctcggccaaacctactaagatccttgaccagccagcaaccgacaagcccctgcttaaccagtgcaaagccttcctgcacgccggggcggtcaaaagatgaggttagataacgatactttttgaaacacagtaaaatcaaggtttttcggacaatggacaagcatggtttgtactacaactaaatattacaccgcacaagcggcgtttccacttccatacggaagaacagaaacgccgcttttttcataccctttgttacgcagtaggggcaaaaaaagccttgctacaagcggctttgcgagtgcgaaaaccacttaggcgatacttgatacctaaaccctcaaaatcgccgttctactgcgtaacaaatccacaacaaaggagtgatgaagctatggcagttttccgtgtggagcgaaacaaaggttataccgtaatgagcaaccaccacttacgcaacaaggagctttccttaaaggcaaaggggctgttatctcaaatgctgtccctgccggaggattgggattatacccttgcagggctgtcctttatcaaccgggaaagtatcgacgctatccgtaccgccgtttgggagcttgaaaaagccggatatatcacaaggcggcagggacgcgacgagaaaggcaaaatgaccgctatcgagtacaccatttacgaacagccgcagccgccggaattggattgcccggtattggaaaatccaacagcggataacccgatattggaaaatccgacaacggataatccgacgttggaaaatccaatgcaattaaataaagatatatcaagaactaacttaccaaaaaaagaaaaatcaaatacggatttatcaattacccattccattcctatccattccctaaatcccttgccttatggcgaggacgaagcggcacagccgccggaacggaaaagaacggaaaggaacgacgcttaccgagtgtatgaggaaattatcaaagacaacatcgcctatgacattctcttgcaggacagaagccttgaccgcgaccgtctgaatgagattgttgacctcatgcttgaaaccgtctgtacggcacgaaagaaaatccgtattgcaggggacgattaccccgcagagcttgtgaagtcaaagtttatgaagctgaacagcgaacatatccgctttgtgcttgactgtatgcaggagaacaccacgaaaatccgcaatatcaagcagtacctaaaggcggttcttttcaatgccccgtctaccattgacagctattatacttcccttgtcgctcacgacatggcaagcggcgcattatccggcaagcctaaatacggcgacccggactactacacctacaacgagggcgaaagcctgtaaacgaaaaaaggaggatttaccacatggcacagaaaacaggagctttaatttttgatgaaaccgctgaccgctacgacattcgctttgacattgccgactattacggcggcttgcattgcggcgagtgcatggacgtattcacaggcggcaaatggaagccgacccggattgagtacggggacaactggtatcttgtaggtatccgcgccgaggacttgaacgggctgcgggtgcggatttaacggggcggcgtgaacaacggacgcccttttttcacgccccaaagcggcgtaccaccttaacactatcactaccgggaaaggaggacggtaaacattgcaggacgaaatcaacgaaaaagtggttgcgctctctgtcaagggagcgaagctgaccgctgaaatgctgcaaaaggcaatcaaagccatgcttgcacaggcaaaaaaacagcaggaaaaacagacccacgggaagcagaccctaaagcagcttgcgaagcagaacgcggggctatccaacattgagataaccgagggcaatatcaaagcctttgagcagacggcgaaaaaatacggtatcgactttgccttaaagaaagacagcaccgaaacgccgccccgttatctcgtctttttcaaggggcgggacgcggacgctctgaccgcagcctttaaggagttttccgcaaagaagctgacacaggagcaaaagccctctatccgaaaggcacttgccacattccgggaagcagcaaagcagcttaacgcgaaccgtcaaaagacaaaacacaaggacagggaggtgtcgctatgaagccgaatatcaagaagctgcttatcctaaacgccccctatctgctctttgtgtatctctttgataaagtcggacaggcggtgcggctctctccgggggctgacctctccggcaagctgctttccattggcagcggcttttctgccgccttttcaaatgccctgccgagttttgcccctatggatttgcttatcggcattgtcggggctgtcgttatccggcttgcggtctatgtgaaaggcaagaacgcaaagaaataccgtaagggcatggagtacggctctgcacgttggggcaacgccgaggatataaagccgtatatcgaccccatttttgaaaataacgtgctgctgacgcagaccgaacggctgatgatgtcaagccgcccgaagcacccgaaatatgcacgaaacaaaaatgtacttgtaatcggcggctccggcagcggcaaaacgaggttttttgtaaagcccaacttaatgcaaatgcacagcagctatgtagtcactgacccgaaaggaacggttttaatcgagtgtgggaagctcttgcagcggggcgggtacaaaatcaaggtgctaaacaccatcaatttcaagaaatccatgcggtacaatccctttgcctatctgcgcagcgaaaaggatattttgaaactggtaaataccattatcgccaacaccaaaggcgacggggaaaaatccggcgaggatttttgggtgaaatcggaacggcttttttactgcgcccttatcggctacatctggtacgaagccccggagaatgagaaaaactttacgacgctgcttgaaatgataaatgcgtcggaagcccgcgaggacgacccggaatttcaatcccccgttgacctcatgtttgaacgcttggaggaaaaagacccggaacattttgcggtgcgccagtacaagaagtttttgctgtctgccggaaaaacaagaagctctatcctcatttcctgcggtgcgcgtcttgccccctttgacattcgggaactgcgcgagctgatggaaaccgacgaaatggagcttgacaccttgggcgatagaaaaaccgccctttttgttatcatatccgacaccgacgatacctttaactttgttgtatcaatcctttacacgcagcttttcaatctcttgtgcgacaaagcagatgatgtgtacggcgggcggttacctgttcatgtgcgctgtctgcttgacgagtttgcaaatatcgggcagataccgaagtttgaaaagctcattgccactatccgaagccgtgaaatctccgcgtcaatcatcttgcagagccagtcgcagctaaaggctatctacaaggacaacgccgataccattgtcggcaactgcgatacgaccctgttcttgggcggcaaggagaaaacgacccttaaagaaatgtcggaaatcttggggaaagaaacgattgacagcttcaatacttccgaaacaagaggacgggagctttcccacgggctgaactatcagaagttaggcaagcagcttatgagcgaagatgaaattgcagtcatggacggcggcaaatgtatcttgcagctacgcggtgtgcgtccgttcttctccgagaaatatgacattaccaaacacccgaagtacaagtacctttccgactttgacaagaaaaacgcctttgacatggaaaagcacttgcgccgccgtcctgcaatcgtgaagccggacgaggtatttgactactacgaagttgacgaagcagatttgcaggaggacgcagaatgaataagcgtatcagaaagaaaaaggcaaaacagcagctaatccgggctatcagcgggcttgtggaagcagccgaggaaatgcagcgggaacaggaacgcaggacaagacaggcgggtatttcctatatcaagtatatcgaagctgtccgggaacggcagtacggcattatgcctgtctacacaccgctttttgaaaaggagggagcttaaagtaaaaacaataaacacgggctacatggtacgcgcccctactccttgcgcgtatcgcggcaggaagccgcacccttacaactgaataccgccgcgccgcagcaacaaacgcagcgcggggacttatgaccgcggcagttatcgaaaactgaccgccgttttttatgccctttttcgggcagccgcacagcggcagaaaggagttatattatggcatttttcaacagcgcagtaggcgttttacagacactcgttatcgctctcggagcaggtcttggcatttggggcgttatcaacctcttggagggctacggaaatgacaacccaggtgcaaaaagccagggcatgaagcagctcatggcgggcggcggcgttgcccttatcggtggcacccttgtacctctgctttccggcctgttcggttaagcggcggggttagcctatgcagagcatacttgacgcgattaacgaatggataaaggaaatcctcattggagccattaacggtaatctgtcaactatgttcggggacgtaaacgaaaaagtcggaactatcgccgcagaggtaggacaaaccccgcaggggtggaacgcaggcatattttccatgatacagagtttgtcggaaaatgtgattgtacccattgcggggcttgtcattacctacgttctatgcgtggagcttatcagcatggtaacggaaaagaacaatatgcacgatattgacacgttcatgttctttaagtggtttttcaaggcgtgggtagcggtgtatctcgttacccacacctttactatcactatggcggtgttcgatatggcgcagcacgttgtttccggcgcagcgggcgtgatcggcggcaatacgaatatcgacgttgacgccgccctctcgtccatgcaagccggacttgacgctatggaaatccccgaactgcttttgctcgttatggaaacaagccttgtgagcctttgcatgaaaatcatgtcggtgcttatcacggttatcctgtacggcagaatgatagaaatttacctttactgttcggtatcgcctatcccgtttgcaactatgaccaacagagagtgggggcagataggcaacaactacttaaaagccctgttcgccctcggttttcaaggcttcctcataatgatatgcgtcggcatttatgcggttttggttggcagcatgattgtagcggacaacctgcacagcgcgattttctcccttgcagcctacaccgtgattttgtgcttctccctattcaaaacaggcgcacttgcgaagtcaatatttaacgcccattaaagaccgaaaggaggaggttttcacttggcgtatgtacccgtacccaaagacttatcaaaaatcaaaacgaaagtcgcttttaatctgacaaagcggcagattatatgttttgcggcagccctcgctatgggactaccgcttttctttttgctcaaagacagcgcgggaacaagcatggcggcatttgcaatgattgtcgttatgcttccctgcttcctcttggcaatgtatgaaaaacacgggcagccccttgaaatcgtgataaagaacgtcattcagacaaagtttatccgaccaaaggaacgcccctatcagacggaaaatttttatgccgtcatagaaaaacaacgaaaactggaaaaggaggtatcggctattgtcaatggcagaacgaaaaaccatgacccgcgcggtaaaaaatcccgtgaagcgtaagctgacccgcgcagaaaagaaagaaatcgccgccgtgatacaggcggcaaagggcgacgggaagccccgcaccgcacaacagaccattccctacttgcagatgtacccggacgggatttgcagggtaacggaaaagaaatacagtaaaagccttgtctttgaagatattaactatcagcttgcacaggcagacgataagacagccatttttgaaaactggtgcgattttctcaactactttgacgcttccgtttcggtgcagctctctttcatcaatcagggtgcaagaaaggaaaaggcacaggcggctatcgaaattccggcgcaggacgacgcttttaactctatccgcagggagtacgcggatatgcttaaaaatcagcttgaaaaaggcaacaacggactggaaaagtgcaagtacattaccttttccattgaagcggacaatcttgcggcggcaaaagcccgcctttcccgtatcgaaaccgacgtactcaataattttaaggtgcttggtgtaaccgcccgccccatgaacggacaggaacgcttgaacgtactgcatgggattttccacccggagggcgagccgttccgtttctcttgggactggcttgtaccgtccgggcttaccacaaaggactttatcgccccgtcctcgttccgctttggcgacggcaggacgtttcgcatggggcgcaagctcggtgctgttagcttccttgaaatccttgcgccggagctgaacgaccgtatgctttcggacattctcgaccttgaaaacggaattatcgtcaatctgcatatccgcagtatcgaccagagcgaagcaatcaagactatcaagcgcaaaattaccgacctcgacaagatgaagattgaggaacagaaaaaggcggtacgcagcgggtacgatatggatataattccgtccgaccttgccacgttcggcagcgaagcgaaaaatctcttgcaggatttacagagcagaaatgaaagaatgtttctgctgacgttccttgtggtaaacatggcagacacgaagcggaaactggataatgacatctttgctacggcgggctttgcacagaaaaacaactgcgctctgacccgccttgactatttgcaggaagcgggctttatgtcctctattcctcttggggagaaccttatccccattcaaagagggcttacgaccagtagcaccgctatttttatcccgttcatcacgcaggagcttttccaaaggggtgcagccctttactacggcttaaatgcccttagtaacaacatgatactctgcgaccgcaagcaactgaaaaatcccaacgggcttattcttggaacaccgggaagcggtaaatcctttgcggcaaaacgggaaatgacaaacgcctttctcattaccgacgacgatattattatctgcgacccggaagcagaatatttttcccttgtgcagcgtttgggcgggcaagtgatacgtctgtcgcctgccggaaaaggcatggacggcaagccccagtatgtgaaccctatggatattaacctcaactactccgaggacgacaacccgcttgccttgaaatccgactttatcctttccctctgcgagcttgttatcggcggcaaagagggcttgcagcccgtggaaaagaccgtcattgaccgcgccgttaggaatgtgtaccgacctttccttgcagaccccgacccggcaaaaatgccgattttgggcgacctctacaacgaactgctgaaacagccggagccggaagctgcccgcattgcggcggcattggagctttatgtttccggctctctgaacgtctttaaccaccgtaccaacgtggagctttcaaaccgtcttgtctgctttgatattaagcagcttggaaagcagctcaaaaaattaggtatgctcattgtgcaagaccaggtgtggaaccgcgtgaccgtcaaccgcgccgagaaaaaggcaacccgttactatatggacgaatttcatttgcttttgaaagaggaacagaccgcagcctattctgtggagatttggaagcgttttcgtaaatggggcggcataccgacggctatcacacagaacgtcaaagaccttttaagcagccgcgaagtcgagaatatctttgaaaactccgattttgtcctcatgctcaatcaggcacagggcgaccgggctatccttgcaaagcagcttaacatctccccgcagcagatgaagtatgtaacccacaccgaagcgggcgaggggcttatcttttacgggaatgtggtgctgccgttcattgaccgcttcccgacggacaccgagctttactgtctgcttacgacaaagccggaggaagtgagcaagccatgaaaacagacgtaatcatcaaccgcgacgccctctatgccctgcgggagcttccgagcgaaagcgtgaactgctgcgtcacaagcccgccttactatggactaagggactacgggcttgacgcgcagattggacgtgaggacacgccggagcagtatatcgggcggcttgtggaagtgttccgggagctgcgccgggtactcaaagacgacgggacattttggctgaatatcgcagacacatactgcggcagcggcatgaaagcgggctgcaagcaaaaggatttaatcggtattccgtggcttcttgcctttgccctgcgctctgacgggtggtatttacgcagcgatattatctggctgaaagaaaaccctatgccggaaagctgccgcgaccgaccgagccgctgctatgagcatatctttttactgacgaaatcaaagaaatattactatgacgctgccgccattgcagagccgatcgcgccgggaacggctgcgcgctacaggcaagggcgcagcgcaggacacaaatacgccgaggaagtaccaggacagggcaaggtacagggtatcaatcagccccgcagcggcagctattatgacgacgcccttatgccgaccacaagaaacaagcgggacgtttggcttatcaataccgtaccgtacaagggcgggcattttgccgcctatcccccgaagctcgcggaaacgtgcatacttgcgggctgtccgaaaggcggcgttgtgatagacccgttctttggaagcggcaccaccgggcttgcagcgcaaagccttgaccgccgctatatcggcattgaactgaacgccgagtattgcgcccttgcagggggcgcggattggaggtggtaacacttgaaagacccattaaagccccgcgataaaatcacgcagaaaatgacccgcgacggggctatcgcagaaaatcagaccacgggagacacggaacgtatcagcaaccgcatacgggacgcggatttacaaaagaccccggaacaacaggcggcacaggacgctatgcagcttcccccggtatctgatacaagcccgcttccccatgtgccgggagctgcccccaaagcggacacaggcaaaacggagcgcgtcatgaagcatatcgacgccgcccatacacgaaaagccagtaaaaaggcagtacgaaaagcacaggcagaagctaccgccgggacgaaatcttcccggctgcaatttaccgacgaggaacgcgctgccccggagcttgaaaagtatatcaagaaatccgataaagccgccgaccgcttggataaggcaaaggcagctatccccaaagaaaagaaactggtaaaagagcgcacctttgacgaaaccaccgggaaaggcaagacccgcctgcactttgaggaaaaggacaagccgcccggatttaaggagaagcacaacccgctatcccgccccacacaggaagccgggattttggtacataacaaaatccattctgtcgaaaaggataattccggcgtggagggcgcacacaagagcgaggaagccgcagaacggggattgaagtacggggcgcggaaaatcaagcagggctaccgcaaccataagctgaaaccctaccgggaagcggcaaaggcagaaaaagcggcttttcgggcaaatatggactttcagtatcacaagaccctgcatgagaacccgcagctaaccagtaaccccatttcccggttttggcagaagcagaaaatcaagcggcagtatgcaaaggatgcccgcaataccgcaaagggtatcaagggcgcggcagaacgcacccgcaaggcggcagccaaagccgccgagaaaacgaagcagaccgcagcatttgtggcaaggcacccggcgggtgtggcaatcgctgtcggggtgctactgctctttatcatggttatgtccgggctgtcctcttgtggggcaatgttttccggcacgttaaacggcgtgcttggaacgtcctatacgtccgaggacagcgaccttgtggaagtggaaaacagctacgcaggattggaaaacgagctgcaaagcaggattgacaatatcgagcgcgacaatccgggctatgacgagtaccgctatgaccttgcaaatatcggacacaatccccatgaattagcgtcttatctgaccgcaaaataccaaagctacacctgcgccgaggtacagagcgaattacagcggattttcaatcaacaatacaagctgacgctaaccgaggaagtggaaatacgctaccgggaggaagaacgcaccgacacatggacagatgaggacggcaacgagcatacggacacctacacggtacaagtgccttatgagtattacatcttgaacgtcaagctgacgaataccccactatccaccattgcggaaaacaatctgaccccggaacaactggaaatgtaccgggtgtacttacagacaagcgggaacaagccccttatctttggcggcggctctcccgacacttccgcgtcggaagatttaagcggcgtggactttgtaaacggaacgcgccccggcaataccgctatcgttgaccttgcaaaacggcaagtcggaaatgtgggcggctatccgtattggagctggtacggctttaattcccgcgtggaatggtgcgcctgtttcgtgtcctggtgctacgggcaaatggggctttccgaaccgcgctttgccgcctgccagtcgcagggtattccgtggtttacctctcacggacaatggggagcgcggggctatgaaaacattgcccccggcgacgctatcttttttgactgggacttagacggcagcgcagaccatgttgggcttgttatcggcagggacgaaagccgcgtctataccgttgagggcaattccggcgacgcctgcaagattaagagctatccccttgactatgcctgtatcaaagggtacgggctgatgaactggaactgacatacaacaaacacatttgaaaatcgaaaggagaaaaatcattatggctatgagtaaaatcgaaagaattgaaaaggaaatccaaaagacccgtgagaaaatcacggagtatcagaacaagctgcgcggactggaagcacagaaaaccgaagcggaaaatctgcaaatcgttcagctcgtgcgctccatgcgcctgaccccgcaggagcttaccgctatgctttccggcaacggtattccgggcattgcccctatccccgcagactatgaggaacaggaggacaatgcagatgaagaataaaatccttgcaagccttaccgcactttgcgccgcccttgtccttgtgggcggcttttctgttactgcctacgcgcagaccccgacggaggaaaccgacgacagcggcgtaatcgtggaaaccgaaccgcagccccttaccccggagggcaacatgacccttgtggacgacatcgacggggacgctgccgaggataagcagtttatcgtcgtgaaaagcaaaggcggcaactatttttacattatcgttgaccgggcagccgagggggaaaattccgtccacttcttaaatcaagtagacgaaagcgaccttatggcgattatcgtggaggaacagaccgagcagcccccggctgtctgcaactgtaccgagaaatgcaaggcgggcgaagtaaacaccgcctgccccgtctgctctgtcaacatggatagctgcacaggcaaggaagccgcgccggaggaacccaccgggcaggagcagccccaaaacggcatgggcgggcttttgattttccttgtcgtgggcttgcttggcggcggcgcagccctctactacgttaagtttatgaaacagaaacagaacgtgaaaggcagcaccgaccttgacgagttcgattttgacgaatacgacgaggacgagtcggaagaagctgaccgcgcagacaccgaacaggaggacgaggaagaatgaaacttgtgatttgtgagaaacccagcgtcggggcggcggttgccgccgcccttggcgtaagggagaagaaagacggatatatcgaggggaacggttatgttatctcttggtgtatcgggcatttggtaggacttgcggaagctgccgcctatggggaacagtacaggaaatggagctatgacagcttacccattctgccgcaggaatggcagtacaccgtagctgccgacaagggaaagcaattcaaaatcttaaaagacctcatgcagcgcagcgacgtttcggaagtcgtgaacgcctgcgacgcaggacgcgagggagaattgattttccgctttgtctatcatcaagcgggctgcaagaagccctttacccgtctttggatttcctctatggaaacggacgccatcaaaagcggctttgacaatctgaaggacgggcgcaggtatgacgctctctatcattccgcattatgcagagcaaaggctgactggcttatcggcattaacgcgacccgccttttctcctgcctgtatggaaaaaccttgaacgtggggcgcgttcagaccccaaccctaaaaatgcttgtagaccgggacgctgccattatgaacttcaagaaagaaaaatattaccatgtgcgccttatgctccccggcgcagaagcggcaagcgcgaagatctgcgccgctgatgaagcgggcaaactgaaagcggcctgcgaagcgtcggcggctgtctgcacttccttgacccgtgaaaataaaaccgctataccgccgaagctctttgaccttacctctctgcaaagggaagcaaaccgtatctacgggtacacggcaaagcagacccttgaccttgcacagacactttatgaaaagaagctgcttacttatccgagaacggacagcaactatctgaccgacgacatgggagaaacagcgacgggcattatcaaggtgctttgtgagaaactttcctttatggagggcgcggatttttcgccggagattgcaaaggtgctgaacagtaaaaaggtatcagaccaccacgcaatcattcccactatggagcttgcaaaggctgaccttaccgcgctgccggaaagcgagcgcaatatccttacccttgccggggcgcgtctgcttatggcgaccgccgagccgtacagttttgaagcggtaacggcggttttctcctgcgccgaccatgaatttacggcaaagggaaaggcggtaatcgctgccgggtggaaagacatggaacggctttaccgggcgaccctcaaaaagaagccggacagcgacgacgaaaacgaacttgttttagatgtgcctgactttaccgagggacagacctttgaaaaccctgctgcaaaggttacggagcatgacactacacccccgaagccccacaatgaagcgtccttactttctgctatggaacgcgccgggaatgaggacaccgacccagacgcagaacgccgggggcttggtacacccgccacccgcgccgctgtcattgaaaagttagtcaaaggcggctttgtggagcgcaagggcaagcagctacttcccaccaaagactgcacaaaccttgtctgcgtcctgccggacatcttaacttctccgcagcttacggctgcatgggaaaacaatctgacgcagattgcaaagggcaacgccgacccggacactttcatgcaggcgattgaagcaatggcgcaggagcttgtaaaaacctatgcttccgtgttgggcgaaaagccggagcttttcaagacagaaaaaacagagcttgggaaatgtccccgctgcaaatccccggtctacgagggaaagaaaaactactactgttccaacagggattgcagctttaccatgtggaaaaatgaccgcttctttgaggaacggaaaaccgtctttaccccgaagattgccgcagcactcttaaaatccggcaaggcaaaagtcaaaaagctgtattccgtaaaaacgggcaaaacctatgacggaacggtactgttagccgacacgggcggcaaatatgtgaattacaaagtaaccatttcaaaggacaaagaactggaatagcaagcataggaagcgggtacccacttccgtaaaatccctgccactcttaccgagcttggcgggaattttgcttgttgggaagtttcccaaaccctctaaaaatcctcaaaaatctttggcagaaatgcgggcgcaccgtagtaggactatgtaaccacaaacgcagcgtccgcgctgccatacgcgaaaggaggtcttacgcatggcaagtttgcgcgacagcgtaaaggactatcaagaggaacttagggacggtatcgcatgggtagcattttggaaagagggacgttcatggaacgccgagctgtttcatcttgaagtggacggtactttagaaccgtttgacaggagccggttagaggaaatcaaggcggctgaccccgccgccgttattttaaacggctactactgcgggcatttaggcgagaatatgagccttgacgagctgaccgccgtagtgcgctatcactatgaaaacagcaggaatgaccttgacggttttatcggggcacatgacgacaggcttcccccggaagttatcgaggaagcaagagctgccgcccatgcagcggggcttcccttttccgaaaagccctaccgggacggggaagattttgacccttatgtatttgacgggagcatgagcattgaggactacgaacttatgcaccgcatgattgaaaaagaaaggagcgagcaaatggacgaatggaaaacaggttattcctcatacgaccatgacagactggaagccgccgacaagatgaagattgagcgcggtatctattttgacacgaaaggcgcggatatttccccgctgaccgccttaccccttgccgagcttgtgaagctgcgggaggaaagcgcggctgcggagcagaccgtatttgaaaatctgaaagtacaggcttccgcatgggaggaacaggcaggaaagaccctgctatttgacaaggcgattgagtatgcgagaatacccgaagtgaagcatacggcgaacaagtggcaggacgaggacaacgaccgccacaccatcagcaaccgggtatataaaatgagctaccatgtgtatgaaaatacccgctacgacaaggcagcacagaaatctattccatattcctatacgttatcttggaacatctacaccaacagcccccacgggtacggacaggcaaaaatcgccggacaggacagaaaggtatttgctgaccgggcggctatggaaaaatatctgaatgggcgtgtcaaggcgtatgaaaaactttttacggaaatctccccggctatcccgccggaatacgcggaacagtttagggtaaacgggcagctcttaccgggctacaccgtagagggcgaggaaatcaagcagcccgccgccgacattcccgccgctgcaccgagaaccgaaccgggacaggaaacggaacagtttgcaatcctgattgacagccgcacccgttttgaaacgggagaaccgggcggctactggctttccatgcccgccaccaaagagcagcttcacgaagccatgcaaagcgtcggcattaccgcagacaacccgcaggactttttcattcacggctactctgaccgggaggacagacacattgccctgccgtatgacatggtatgcgcggcacaggtggacgagctgaatttccttgcggcacaggtggacgagctgaatttccttgcggcacgactggaaacccttgacgcttccgggattgccgcgctgaacgcagccacgcagcgaaagaacggttttgagaatatcgggcagctcattgactttacctataacgaggactttttcgtgcatatccccgaagtacacacaccccgcgaattgggcgattattaccttaacaaatccggcatggtgcaaatgcccgctgaatggaaaaacagcattgaccctatcgcctttggacgaaacgccgccgcgcaggaaaaaggcagctttacggaatacggctatcttgtggaaagcggcgacgcatgggagaaacactttgaggggcgcgatgtgccggaggaataccgcattatgagctatccgcagccgaccgtcgaacgggacgcagccccggcagtacaggcggctgttcccgaagcaacgccgcaggagccgcgcccggttatccctatcgttctgacgagcgagaagcccgccgaaaagctcaaagagattaccgaccgtttggagcaaggcattacggaactgtttgacagcgagcgttacaaggaatatctgcgcgtcatgtcaaagtttcataattatagctttaacaatacgctgctaatcgccatgcaaaagcccgacgcttcccttatcgccggattttccgcatggaaaaataactttgggcgaaatgtgatgaaaggacaaaagggtatcaaaatccttgccccgtcgccctttaagattaaaaaagaaatggagaaaatcgacccgcagacgggaaaagcctttatcggcaaggacggaaagcccgtaaccgaggaaaaggaaatcacgatacccgcctttaaggtggtatctgtctttgacgtatcgcagaccgagggcaaggaaatccccgacattgccgtaaatatgctgaccggagatgtggagcattacaaggacgttttcgctgcccttgaaaagacttctcctgttcctgtcggctttgaaaaaatcgagggcggtgcacatggttactaccacttggaggacaagcgtattgcccttgatgagggcatgagcgagctgcaaaccttaaaaacccttatccatgaaatcgcccatgcgaagctgcacgacattgacctaaacgcccctttagagaacttggagaacagacccgaccgccgcacccgtgaggtacaggctgaaagtatcgcctataccgtgtgccagcattacgggcttgatacctctgattattcctttgggtatcttgccgggtggagtgccggacgggagcttaccgaactgaaaagctctcttgaaacaatccgcagcaccgcagcggaaatcatcaacagcattgatgaacatatcgcagaactgcaaaaggaacaggtgcaggacgcgccgagggagaaagccgccatgccggagtacatttacaagattgaagccaacccccgcacaacgggcgacaacgaccgctttttcttgcaagcctatctcccgcaggaaaacggcagggcaaaaatcggggacgtgctgtatatcggcagccttgcaaaatgccgggaactcatgggcgggctgaacgccggagagctgacgcagggagaagtaaaggagctatatgcaaaggcgcaggaagccgaagccgacaaagacaccttttccatttatcagctaaagcaaggggacgaaacgcgggacttccgctttgagccttacaaccgcctgcaggcggcgggaaatgtggttgataaggcaaactatgagcttgtctattccgcagagcttacgccgggtacttcccttgaagatatttacacccgtttcaatatcgaccacccgaaagattttaagggacacagcctttccgtttccgacgtggtagtgcttcatcagaacggacaggacgcggcgcattatgtagatagtttcggctacaaggaagtgccggagtttttgcaggagcagacacaacagccggaaaagataaacccgctaaagcacgtcgaggacacaatcgagcagaacgacaacaactttgacggtatcatcaacaacacccctacggttgacgaactggaagcaaaggtaaaagccggggaacagatttcccttgttgaccttgcagaagcgattaaggcagacaaagaacgcggcaaagaaaagccctctatccgggcgcagcttaaagctgacaaagaacggacggggaaaaagaagaacgcaaagcagaagtcgcaggacttggaaaggagctgacacatgagcaaattaaataaatttgaagatgtagacgtgttcgctttcctcaatgcgattatgaagcagaatacaggcttttaccaaagcgattttgatattgacagggagattatcgcaaaaacggcggcaagcgaaagtaaagaggataagaccctcttatggttttgccgcccgtccgggacgcattgcttccgggagcgtgacgttttcctaaaggacaccgcgccccataatacctggcgtttttacatggagcagacaagcgaccgtattcttgcctatgcaatcgagctgacaggcaaggagcatggaaaaatcaagggcaatctgtatgagcttgactattcccgccattatgagcgcgtcaaagaaaaagggctgcccgccgatgcggtaaagctgatttatgagcgcggggagcagatgatacccgccggacagtatttcaacggaagcccagacccgcagcttgggaagtttgaacgctttgaagccatacccaacgacccggacgctcttaaatggctcttacaggaggaacaccgcagccgggagcaacttccaccgggagattttaagtcacatatcgccgcattgcatgacggactgattgaaacggaagcgcggcgcattgtgcgggaaataaagcggaatgacacgccgaacagcccgaacaagacccatttcatggtggagctttccccggcgttcatgcagcttgcgaacacaaaggacattgaccgccttttctccatgctgccctacaagaccctttccttttccaaaatcgagggcagacatggaacgtatgcactgattgacaagggagagaaccgggacaaagagattaaaaagccccgcccctctgttcgggcgcagctaaaagcagataagacaaagacagcccctaaaaagacgacgacaaaagcaaaaaatcacgatttggaggtatgagcatgaatagattgactgttgaggaaacaaaccttttgagcatttaccatgagggaagcaaggcgcagcttatagagaacatgaccgctgcgctgccttacatggacgcgggattacgggagcttgcaaagcgcaccctttccaaagtaggcgcgctgaccgaagccgagtacagggagcttgccgtttatcctgctgatgaagtatgaccgggattaagcggctgtcgccgcgacaaagccgcaaggtaaacacccttgtgaaaaaggagtgctgcaactgcgagaatggcaactgtattttactggacgacggggacacttgcgtatgcccgcagcttatttcctattcgctgctctgtaagtggtttcggattgccgtacttcccgccgacaagctcctgtatgcagaactcaatcagaccgaggacagaaagaaatgtaccgtgtgcggcgcgttctttgcgtccacctctaacagcgtcaaatactgcccggactgtcggaagcggattacccgcagacaggcagccgagcgcatgagaaaaaagcgtactcttgttacgcagtaggggcgaaaaaagcttttgattgcagggcttttcggacgcaaaaacaaagaggtaaaggattgatacctttacccctaaaatcgcggttctactgcgtaacatttcaaaagctgcacctatgagaaaacgggcgcggtggccaacatatcggctgccgcgtccgttctttttttgcgctcatttatccgcgctctgcttctttttcccgttcaggctgacgttccactttcaaaatactgtcgatattcttcttgataacgtcgtattccttgacctgctttttcagcttcccatagtcggcatacagggcttctttctgctcttgaagtgctgcgtactctgcttgcagggcggcaaggcttggtagcttggttatccccgccgccttaattgcctttgccgctgcttcatagagaataatatcgctctcatgggctgtccggtatttctccttatcctttgccttgcggtatgcagcatagacgggcttggtcttttgataggtattgatattcttgataagcagcgtcatatcggtaagccgcttttcaacctctttcaagctgtccgctgcctgtttgcttgctttggcaacttccgtgattttcgcggtcaattctgcgtactgttcaatcttatgttctgtcaagaaattcatggttttcgctgcctgtttcagattatggatttttgcccattgctcatagccccggctttcctgcgccttgatactgttctgaatatcaatgagcagactaacgccgccgcgatctgcgcggggagctttcgcagcgcgggcgcgtttgccgcttatccgttctctgatagcttcctctgtataatctgcgccgagggttttaaggcgggtaaaccgttcctgtccgggagcgcggcaggaaatgtatttacccggttttatctcatagcccgcagcttctaaccgcaatagcagttcctcaaaacttgacacttggggaataagcgtgtccacggcaattttgagcttgcctttccaactggtacccgttttctctgcctggtactccgcatagctttttcccttgctgcccctgttcggagcgataacagacaagccatgttcccggcacagcttatcgctcatgttccgtatgccgtaatagctgcgcttattggaattgtacttgtggtggtctacgaaattgaccgcgcagaaaatcacatgattatggatatgccccttatcaatatgggtagtcaaaacatattcgtgctgtcctttggttactgcgtcggcaagctgccgcccgatttcatgggcttccctgtaatctacctctcccggctcaaaggcttgtatcaaatggtgggcgagattgttccccttgtctatggcttgggcgagggtaaagccgaactcaatgtctgccgtttcataggagcagccaaaggaggacacaagcattttttcatcagtctttgccggattttggatatagtcaagggctttgtttagcgttcctttaataggcttaatctttgtaaccgccatatttccgcaagcaccccctttatttcttctatgtcctcttggtagacgctgcctgtactgttcacacgctttgcaatctgattgacgttgacgccgattttctgtatctccgctgtcatagcttttatgtcggtatggtctacttgcaggatatacccgtcaatggcaatcttgcgaagatacgccgccatgttccgggtgggtatcagcttcattttttcaagtattaaatcccgttccgcttccgttactctgaatttgatttgtactgtcctttttcgtccgtccatgttttcgctcctttctgttccgagggtttgggacacttcccaacaagcagttttgccgacgctgccgcagggcaggacgggcaaaatacggaagtgggtacccgcttcctatgcttgctacgaaactttatcccccttacttcctacaccaccgaaaaatgaaaattgccaaagtaaaaagaaaaaacgcaacaaacatcattcgtctgctgcgtttcaacccttgttaaattgtcctgacctcatttttgcttctccgtatcaataaccgcctttgccgtttccgttacgatatgcaaaccgccctcgctcaaatcgtcaagcagggtatcaagctgacggcggcgggtagtcttgtctgctgtttcattcgggaaaaagaattggtctacggatatatgataacgggttacaagctcatagaaaatctgcaagctcggctgttgccctttgttctcgatattcgcaaggtatcggggcgatatgttcatatcgtcgcttacattcttgcgggactcgccctttgccattcttgccgcctttatcgcctgtccgaaagcattgaagtcatacggtataactgctcttttcatacttaatcatagtcctttgtgcttttataattcatacccttatattttatagttcctattgctttttggatatgtctacacaattcctatgattagccaaaatagagcatattattcacagaaaatacattgactttattcgtctgaccgtatataatatatagtgatatgttttgtaatttcggaggtggactatgtttgactatatgacagtacaggaagcggcaacaaaatggggaatttcagaacgtcgcatacaaaagctatgcgaggaaaaccgcatactcggtgttgtacgattgagccgggtgtggctgataccaaaggacgcggaaaagcccgctgacggaagatgtaagcaaaacagaaaaacaaggtgatacttaattgataagaaaaagatattaagcaaggagaaagcattatgagcacactattgttggtagaagatgaccaaagtatcgtatcttcattatcggactacttaggaaatgaaggattcaaaattgaaagtgcctccgggcagaaagaagcaatagaaaaattgaatagtgaccagtatgatttagccttggtggacattcaattgtcaaatggaaatggcttttctgtttgttctgcaataaaagaaagaggaacaatgccggttattttcttaactgcttctgatgatgaatatagtgttgtggctgggctcgatatgggagctgacgattatatcagtaaaccattcagaccgagggagcttctttcaaggattaacagcgtattaagaagaactaagaacacgcaaaacattatcggctaccatgacttagttgtggacactaatcaagcaaccgtagcaaagaatgggaaagagattttgttgtctgctatggaatataagttgctgttagtctttctgcgtaacaaaggtattgttctttcacgcagaagattgttagagattttatgggacactaccggagagtttatcaatgataatacgctgactgtctatatgaaaaggctgcgtgacaaaattgaaaccaatccacaggagccggaaatcataattaccgttcgtggacttggctataaggtgggttgatatggaatttatcagaaatagcgaagttaaaaggcaaattgttgtcagcagtattcttactctattttggtgtggcattagcattatcgttgatagcaaagctgtgtggattgttctgtcggctatcatttcatccagtgcggtttccctctttttcacctatcaaagatacaagaaaatcgctgaccttagtttgtatattgataggctactgcatggagatgaaacgatttcttttgaacagtttcaagagggcgagttgtctgttttacatgatgaaatatcaaaaatgacaagacgactaattgagcaggcagaagctctgaaaatagaaaaaggtaatttagcagacgccttagccgatatttcacatcaattaaaaacacctttgacatcattaaatatcctaaacgcctctctttgcaatgaggaactgacagaagaggaaagatatgagttaatccgcaagcaggctatgcttttatcaaaaatggaatggttgattgccacactcttgaaaatatccaaattggatgccggaacgattaccctaaagctacaagaggtatatctaaaagatgtagtggaaaaagcaattcgccctctggagattgcggcagaattaaaaatgcagacaatcaaaaaagaggttcctgcagagctgaaacttactctggatgttgaatggactgctgaagcattgggaaatgtgattaaaaactgtattgaacattcgccggaaggtggtagtattgaaatcaaggcaatagaaagacctcttttgacacaagtcattatagaggataatggagcaggctttcaggaaaaagatataccccatctatttgaccgattttatcaaggaaatggttcaacgattggcaatgccggtttggggttggctctggcaaaaacaatcatcaataatcagggcggcatcatccgggcgaaaaatcaggagttaggcggtgcagaatttgaaatctgcttttatcgggggctactttaagtagccccttttttaagtgacgtttttgtaatgaaatagtaatgaagcagtcactttgccctgctatactaaattgcaaaaatatatggaggaactttttatggaaatattaagagtagagaacatctgtaaaacctatgagatggataatgcccctgtctatgctttgtcagatgtttcttttaccgtcgataaaggagagtttgttgcaatcattggagcatccgggtcaggcaagtctactctgttgcacatattaggtggtgttgacagaccgacttcggggaaagtatttgtggatggacaggatgtttatgagcaaaacgaagatgaattagctgtattcagaagaaggcaggttgggcttgtctatcagttttataatctgattccagttttgactgtcgaggaaaatatcacgctgccgattcgattagatgggcgtaaaatcaataaggagcgtttgaaggaactgttatccacgctcaagctggtaaagcgtagaaagcacctaccaagtcagttatccggcggtcaacagcaaagagtggcaatcggcagagcattgattaacgcacctgcgattatccttgcggatgagcctacgggaaatctggacacggagaacacaagggatattatgaaacttatgcgtgagtccaatcaagcatatcgacagacaataatcctgattacccatgaccgtgaaatcgcaatgcaggcagaccgtattctggaaattcaagatggcagacttgtgagggatgaggtgatacgctgatgaatatgatttttacgcttacactcagaaatctgttgtcgaacaaaaagcgtaccctgctcacacttttaaccattcttttgtcaatcagtatgataacctctattctctgcgggggatggtcattggttgattttctgaaagagaaagaaaaagtgtatggtggcgattatgactactacatggagaatctgacttggcagcaaacccaaaagcttatcagtcaaaacaatgtggatgaggtttcgcttctccgttttgccggaaacagtttttacggggagaaaaccaacagtacaatgctttccattggcgagattgacgaaaactttattgaaagattttcgttaaatcagtatttgcttgcagggcgtttcccgcaagatgaaaatgagattgttatttcagaatcttttttgaagaaaaacaatatgaacatagagattggagatacgctttctttaactcttggttcaagaatatgggatgaatataatgcccagctttccgggctgacaaattataggggcgaagaagaaagtttcgttccaacgaaagagaaagcgtatgtggttgttggtattctttcggatgtgaatgactccaaaatcgcagcaaactataatgcctttgcaggtgttgacaaaacagcatccgattttgcggcgtatgttaaggcaaagaatttatccaattcaatctatgcagaagctgaagaagtggctgccgcagtagacagtcatgtagcaaagtttcattctgaactgttagtctatcatggaattaccggcggcaaaggagctgccaaagtgattgctttggtggtcatggttatgtgccttttgatggctgcatccgcttcgatgattagcaatgccctctccatttctttgcaggaacgaattaagcagatgggaatgttgtccagcattggagccacaaaagggcaaaaacgccttagtgtatatttagaagccttccttttgggtgtggtgagcatacctttgggattggttgtcggcatactgctgtctgctcttttgttaagtgtggtcagggcagcttttggagaaacattcacttttggcattgtagaactgtccttaaaggtaaatggacttatcctgctcgtcagcggcttatctggtattgcttctttgtgttttggcagcagaaagcctgtgaagcaagctgctaaaattacagtcattgaagccatccgccagtctaacaatgaggtatcaaaaaagaaatttcgtgacggaaaaatcgtttctttggtttttggcatttatggttcgctggcagctaaaaatattaagcgtaatccaaaacgcttccgagcgattactggctctattttcttgtcggtggttgttgctctttccttatatagtttgtctgattttatgctttatcagacctccttggatatgaaggaggacggttcctgttatactgatgtgatttcgacgattcaatacaaagatattcctgccgcaatcggggcattatcggatgaaaatatcactgcggatgtttcctattcttttcagcgatatatgaccgctgaattttcgcaggaacaaatcaatcctgatatgcaaggatattttatcaatggtacgaaagcagaggtatatgtcgtaggattggacgaagaacattttacttccttttgtgaggaaaatggctttcatattatggctggcagctccaatcgtggaatcctgctcaatcagacaatgggatattataatgcgggtcaaaatcgagtgattgcaggctccccgtttcttattgaaccgggaacagaaatcgtgccattgggcgagggcagtacgccaatcgttgtagacgaaatcatctcggaagaaaatgcaaatgtccaatccatgtttgtcagagatcgagctgtccttattgtgcctttaagttattttaactggctgatagatgataacgcctatgtggaaatgagaatacagacagcacagcataaagaagcaatggaatgtttggctgacagaggatttccgcaaactgtagacattgcagccgcaactaataattccagacaggtatatacgattgcaaaactggcaatctgcctgttctcaatcctgatgacggttattatcagtttgaatgtttgcaacactatctcaaatacaattcatttgagaagaagcgaatttgctgttctgcgttctgttggtatgactgccaaaggattgaaatgtacgctattgcttgaagctgttttatatggcgtaaaagcattggttcttgcgttgcctgtgagctttctgattcattgtgctatctactacttcatatcgtcgggtatgacaccatttgctttttatatcaacggtggtatctatgtgcttgccgtccttgctgtaagtgtaatggtatgtgtcgcaatgctgtttgcattcaaaagcgtgtcacgggtagagattgtaaaagagctaaaattgagtaatatgtaatgaaatcatcaaggaatggaggtgcacattggaaaaagaaaaatgggtgttatgcccaatctgcaataacaagacccgtattaaggtgcgccccgatacggtacttgaaaacttcccgctattctgccccaaatgtaaacaggaaacgattatcagcgtaaccgggcagaatgtggttgcggttaagaaatcagaaaatgcaatttaatatattagttattacagagccagacgcatagatgcagagccgatgaacttgtgagaaatcgcagtttgtcggctctgttttttattaaagtcgccgtctgtgacgaataaagcttaacgcagcggtatcaaggaggtattgctgtgttatctttcattctcgctaattcgcttaatcacttatggtcaaaaaaagcccttgtccaccgtcgggatatttcggctatgagtatgaactgacaattcaatttaatactgtttataattccttttgcgcctgtttgcgtcttgcgaacaggcgcattttgtgttttataaaaatttttttggaaaattctccgctttgcgttggcagttttgaaaacgcggtgctgagggttacgaaaggggaaatcaaacaatcacccgctttcgcggttgcgaaaggaggtgaacaccttgaacgaaccatatcgtacccagtttgaagtgcgctgcgctttcaacggtttttgtaaaaaagccttgaaatatgaagcgagcagtgcgcaccgagatgtgaaacgctatcagaaacactttgtaagtttttccgatttatcgcccgaagaagaaagccagctttacacggttgacaaaccttttgaaagcgaaaaggacgacaattcatttagtgttggcggtaagagaattacccccgaactgttagctgaagctctccgcacattgcccgaagtaaagcgtaatgctgtgatactgtactacttccacgatatgagcgacgcagatattgcaaagctctacaacattccgagaagtaccgtacagcacagacggacaagctctttcagcagcctaaaaaaaaatttttggaggaacgcgcagatgatgaaacagaatggtaatacgagcgagcaaagcgaacgcggtttattgccttatgtggtaatcgttgccgcaaccaaaggcgacccggaagctatgaaaatggtggtacagcactatgagggctatatctcctacctctctacaaggacgctcaaagacgagcgcggtaatacatattacggcatagatgaggacatacgcgaccgcctgcgttcaaaacttatgcgagctgtccttgactttgaggtttaagtaaatccctgtgcctacgtttcccctttccgcaggcacacattgaaaatacctcttttcgttccttgacaaagaaagcggcgcaagataacggcggcgcagtatagggcaaatcagatactttcctcttgtgccgagccgtgcggcgggtgcgccaagacgctatctggcgggattttccaccgggtagccgagcgataaacaccgacgccgtaaagcagctttagcaagctgcgggcgataacacacaagatatataatgatactcccttatagccacagtccgagcgttaaaagcgtcgcaggcaatgggtagggctccggcagaccgccggaggggtggaactcccgtgaggttatgctgataaccgtctgattaaagcccctttttggaaatttatgttgtgatagtggacttgccactattcatagactgtactataaatttgcgaatgaaagggggaacttttaatgtcgcaaaatcaagtacccgttacaaaaacggaacacaaaataggaaaagttacctaccttgtttgttcgtctgcaagtgaacgagcgacggacacattagataaaaagataaagaaacttatccgcaaggatattgagcagaaacccgtaaaaagcccgtaaatcgggcgttgttcacattttaggcgttgaatttggcggcggtagacggtataatattagtagtataaataccagcttgtctgtcgtcggaaaggaggacaaatgttacagacagacaagattaccgctttatattgcagattgagccaagaggatatgcaggcaggcgaaagcgaaagcatacaaaatcaaaaactgattttacagagatatgcagatgaacaccattttttcaatacccgcttttttgttgacgacggtttttcaggcgtgagctttgagcgtcagggacttcaagctatgttgcgggaagtggaagccggaaaggtggcaaccgttattacaaaagacctctcccgtttaggcagaaactatctgaaaacaggcgaactgatagagatagtatttcccgaatatgaggtacgctatattgccattaacgacggtgtagatactgcaagagaggataacgagtttacccctctgcgaaattggtttaacgagttttacgcccgtgatacttctaaaaagatacgagccgtaaaacaggcaaaggcacagaaaggcgagcgagtaaacggcgaagtgccgtatggctacatagccgaccccaacgaccgcaatcatctgttgcctgaccccgaaaccgcaaatgttgtgaaacagatatttgctatgtatgtacgcggcgaccgtatgtgtgaaatccaaaattggctgcgggaacacgaaatactgaccgtttccgaactgcgttaccgccgtaccggcagttgccgacacccacgcccacacccgacttgtatttataattggcctgacaaaaccttatatgatattctcacacgcaaagagtatttaggacataccattacgggcaagagttacaaggtatcttacaaatcaaaaaagacaaagaaaaacccggaggaaaaacaatactttttcccaaatacacacgaagccctgattgatgaagaaacctttgaccttgcacaaaagcgtatcgcaacacgccacaggccgacaaaggttgaaaccatagatattttttcgggacttctcttttgtggggagtgcggatataaaatgtatctccaacagggcgccggaacattggaacgcaaacacgcttatacttgcggaaaatacagaaaccgtatcagaacaggcgaagtctgcacaacacattatatccgaaaaagcgtacttcaagaacttgtccttgccgacctgcaaagggtattatcttatgtgagaaacaacgagcaggattttatagaaactgctaacgagtataacgcaaaggcaacccaaaaggcattgacacagcagcgcaaggagcttgaaaaggcacaggcacgaatgggagaattaaatctcttgttccgaaaactctatgaggataacgcattgggaaaactctctgatgaacagtttgcttttctcacttcgggctatgatgatgaaaaaaagatgctgacgcacaaaatagcggaactgtcaaccgtgattgacaccgccaccgagcgcagcacagatgtaaaaaggtttgtcgcccttgtacgcaagtacacggaaattaacgaactgacctatgagaacgtacacgaattgattgaccgtatcttaattcacgaattggataaagaaacgaatacaaggaaaatcgaaatcctgtatagctttgtaggcagagttgaaagcggcgacgagccgacagaaagtatttcctatttcagacagataggagcagacgtcaaaagttttgctatttaatataaatcaaaaatgaggtaagacaacagactaccaaaaaggtatcgttatcttacctcatcaaaattggttcccgtatatccgtcatccaccagaattttcaagttggtgtagccatgctcggctgcgtaccgggttaaaaactctttttgattctgtatcgaatttgattctccatccagcgcatcctcattgctgaggcggcagtacaggatggtgattttctgctgatccaacatagcgtcctcctttacggttgggtcagctgacagaattggtgtgcatggtgatattgtagcatgaatttgagtctgtgtcatgaacaaagcgcctccttatccgagaaaatgagccgttttaccttgtgggtaagcggttcatttccgtcacatacagtctccagcagataccaggtatttccgatttttcgttctaccgtacctgtaaaaggattcattaggttttcccagcgtttccggcattcttccagaaaatcaatcggcggttcaaaaatcgggtcaaagcaggattcaatatcgatttcagcacaagcgttaatcagcctttccgaaggagaatcatcgagcatcagcttattgagttttgttgtcagattggtcataagcaaaaattcctttctgttaaagttccatatcttgcgatttgcggcgggaaggttgatcgtgttgctttgtttgccgagttcgtgtcaaaatggcgtcaagaaaagcccgcacctttttgggtgcgagcttgacagcgtccagatatggctggacttcctttttcagtttttggtacttgtcataaatcttttcataccgctgtttccagacagcggcactcttttgcgcttgttgcagactatcttccaaacggctgttttccgccttggcaagaatcccattgaccgcataatccttgagtgtgctgcactcggatggggtcagagtgatgttgccggtaatcgtctttttccccatggagcggatttcctgtaccgtcagggcggcagtacgctgttctttggcctgcttttgcagggattgcagctccttctgctttttctcaacagcagcctgtgcggtgtccagcgcctgttctgtctgagcgatttgggcggtcatagcctccagacgctgctgctcctgtgccaccttgaactgggtcacagtcagatgttcctcggtactgccacgctctccacgctccacatcggtatatccggcagctttcatatagttgaagaaatcgtcttgcaggacgctgtacgatgttcgcaggactttcttccccttggtggtcagaagcggatttccctgctcatccagagcaacttttgactcccactttttgctgcggctgacctgcatgatcgtttccttgactgtacccacaagggacttatccttgcaccgtttcgaccaaagaatttgtttttctaccaccgggacatacaccacatgaaggtggtagtggtacacatcctgccccagagcttccgacatggcccggttgcgttcatcagcgtgcatgacggcagagagaatgtactgctcaccgcccacgatctctacggcagctttgtatgcgtcggtgtagaattgcttggcatactcgtagccgccgtggttgtggaagtaagcggagttcacatcgaaaatcagttccccgtatttcaccgcatcggctttcaggccacgagtggagataatcccatcggcaatcatctgatcgaacatagcggcatagctgtcggtgggagctttgaagtggatattccggtaggtctgggtggtatcaatatcctggttggagtagctgcccttttctcgttcgttatgttcctgaacttttgccacatcatcaagggtgggcaagtcctggttacgggcaaaggtgcggtcaattccgtcgtttctggccataaaaatcagctcctttccgttgtatggcagacggctgagggacggggatgcacttcctgcgggaagtgtaataacccactatgacactttcatcccgaagggctgcaaagtgccgtgggctctccgagggggtatgcggcatctgcggatgccttgccgccttttgaggtttgtttgtagtactcaaatcctcaaaaggcggtgtgaccgacagcctctccgcaatctcgattgcttcatttctgccgctcacaggcagagcagattttgcaaatccactctgccatccatctccaaatctgcggatttttcgatggggacgggagatacggtgggtaagaacggcggacattatttgtccctccgcttctgccatacgagatcatagccaagggcatcggcgagctgtaccgcctccacataccgcagagactcccgctggagcttgttggacaggttggaaacgctgtcgctccagccgtaatcctcagaaagcaggtcaacgacttcctgcatcgtgtagccggaacgcacgatgtacgacttaatttcatttcttaaattggatttcatagaaaatacctcattctttcataaaatggttttaccgtggagcatacacgctgcacggtacagtaaatcttgattacttctcaaaaatcgctcagaactgcgcctgtgaagagctgtccagagcaacaccccatcgactttgcgattagatgggcttgcaagcgaaaccgtgaaaatagccacctttccgcataccaccatcaccgttctgtaaatcaccgaatgatgatttgcattctgtttacagtagtgtttttcactgtttgcacaaccattgatcgggaagtgcggattttagagcgccctctgagccgaacaataaaaaatgaacttcgattttttgcgttcgtgcgttccttcgttccacaggctgtacccggtcaggaacgcatgaacgcacgaacagaaggttttgaagtttcattacaactccataggcgagagcaggacataaatgcccatgtatccccgacaccgttttccaccgccgatgtgcaggttattgaccggctctaaatggtagcgttcagcattttggctaagctggtttgcgaagctctttggagacagtgggttttctgcgttgtcctcacaccaccgcttatacgctgcatacagatttttggtgctggcttcataatcggccttgaatgccacataaccctcagaatcgagaaagtccagaatgttattggcatcccgaacagcggaagagatattgtccttggctctctggctgatggtaaagtgatagtgattggcgatcagccgccgcagtccctccagcatccagaggaagattccctctttttcggcaatcagtttctcagcaagaaacgggtcatcgaaccgatccgcaggcttgtctttagtggtcagaatgatctgtcggcgaaagaaaccgtcgctgcggtcgtgaagcgcagttaatgccccgttgccgaagcagagaaaacgcacatacagctgcccctgatagctctgttctttcttccgttccaaatccattcgcagttctgctgtcacaatggattttacatagttggttttggttaaggcgttcatgtcaagatcatcgtccaccatcagcagcttgccctctaaatcggctctggcgaaacgattgttttctaccttctggatagaagtggtgttcatgtttagcctgaaaatggcgttcatgaccacaccgatccggcttttgccctcgccgccctttccgatcagcatgagcattttctgtcctttggtggatggaatcaggcagtagcccagatactcctgtaaggcgggaatatcctccggctccaacagttccgaaaggaagcacagccagtgttccggtgaaggagcatctgcccgataagacaccgacagacggttgttgcagtattctttttcctctgtgaatgtaccgtccagaaaataagtgccgttcgccacatggatgcggtcacattgcaggggcagaggatctgtgtatgcagccagcttcaacgccttaatcacctgctccaccgtctgtgcgaccttggcgtgaagccagggcgagatttcctcataaattgtccgcttcaatttgctttcatccggcaacgggccatccacagtataaaagcgatcattgatgcagcgcattggatgccgggacagtaaatcccggcaatattccggctcgatgattttccctttatcatcaatccaaacagggttgttcatggtattgctcctctctcaggtgggcctgcaatttgcggatgtacccgtctgccgttagttcgctcacgacttcgcctcgttcataagaatcgccttgcagcaggatgtccagctgatactctgcccagggcagccggtggcaggcttccacaaaacgctcatctaaaacagcttccggcgcttgcggtgcataccgttttttccaatccaggagaagccgccgatacttgttcaaaacagaaaagcacagctgctcgttctcacgaagctgctgtgctttggtcttgcatttctttttccgacgaatggcttccggcaagggcttgtccggtgcaaggtgaaagtccgacgccagttttcgggccgcatcatacagccgaaggtcaaacagtttggcagtcaggtcgatcacatccccgtgctccccacaggcaaaacagtggtagtggtcatccgaaacatacaggctcggatgacggtcattatggaacggacacagtgccataccatagtggttgacgtcaattccatacgtttgcgctgcttcctgtgtgttaatattggctttcaccacttcaaacagattcatacagattccctccatttcctttttgatggggcagttttctcacccctctgtataggttatggggaaaatcgaaaaaaacaggctgatggcatgacaagccgttttcaaaaaacatgacaagaatttaattgtgtgctattatgaaaataaaaaaacatgacaggagggagaagatggatcagatcatcaaccatgcagttttgtcgctggatttctggcaggacaccgtaacctatgaggggtgtacgatgcccgcaggaaccattggctgcgaggtgctgaacatcccggacagcaccattgagaagctggatactccctgcaatgtgctgaaccagctacttcaggggatgaacaccggttccgtggatatggagctgctgccgcaggtgcagcaggccgctggcgagatcatctcctttttgcaggttacaccacccttctcccgactgaatcgaagctattttgagcaaaaacttgcagccatcttttccgaggaatatatggaggacgccaaagcctatttgcagcttacccagcaggagcagctgatttgtgctttgactggtcagcacagcaaggcaacaatgctcgtccgaatagcgcaggtgctggggcatttgagttattctctggggcaatacaaggaggccctgacgaaatttgcagagcggttgaatgaacccggctatgaccgtacctcggacggttatgcggcaatgttcgggcagttcttcaaaggtgagccaactctgtcgctggataccccggcttggatgaccctgaccaatgcttcggtgcagtatgtggccgccactcgactcggaaagacggagcctcagctggtcaagcggatgcactatgtctcctttgtggggatgttccgttccgatctgtttgaggggctttgtgtgggccatgcacccaagaaatgccccatctgcggcagatggtttctcaccattgatgcacggcataccaaatactgcggtggtctggcccccggcgatcaacggggacggacgtgtcggcaaatcggcaatctaagaggccgggagcagcgggagcttgcagacgatcaccccatcaaggccatttatacccgccgtatgaacaccattttgcaaagcacccgccgtggaaagctggataaagaaacggcagcagctatgaaaaagctggcaaaagataagatgttccgtgcgctttcagatcagcgctatgccagcactgtctacgagcaggaaatgacccaggatgcacttttagaagcagtaaaaaagaaataagcagcaaaatatcagaaaggcggtgagggaaaatggatacagcgtggacatgggatctgtcttcttactgcgccaaatacagctttctgacggaacccaggggcgtgaccatgcgggaagtggaacgcatctttcagcttgaccccgaaccgcctatctggggaaacctaaacgactacatccttgaggctgtacagcgccataatttgcgctggttttcctttttcctgcactgctatgaaaatcggcttaatggccgtgttcgccgtttcctgctgcgggaggggctggatcgctatagcccagaacgcttttgggactacaaaatgggctgtgtgcttgccatgctggattgtctgcgggaatacgatcccgcacaagggacagattttctgacctatgcccatcactttatcgggaacgctcttttgacctgccggatgcaggaggaggccggttcctttgaaaacgtggatgagtacaaggctgtgcgtgggattgcttggctctataatcaatccggtcagtctgaacaggcggcgattcaaaaatatgctcagaaaaacggttgcaccgaggaaaccgcagcaaagtttttggtattggccaaacaaaaccgaagccgtgttccgttttaccagaccgtacaggacgaggacagcgaagaaaccggcgaggatgtcagccgggatgaccattgggactatgcggagattctatggaacggtatccgggctgaagctgtccgagaagcgtttgaaaagctgaattaccgggaacagacccttttggaaaagaaaaacgccatctgtatgacctgtggacgggtcagccccatcagcacccggctgacctttgaagaactggcagtcctctttgagggcagcacagccagtggtgcagaacgggcctaccgcaaagctgtggaacacttggcctgtctgctgacagaagccggagtgcttcacataattcgcctaaaacgcaaatcccagaccaaacgcaaaaagaaaatcgccgccgctgtctacctgtatcaggtggacaacgacggcgaatggggtgaggtttcgtttgattttgaggctggaacagcggagattgtccggttggcagagtgggatacgacagtcagcaagaattttgcacaaaaagcgattcaatacattctgacctgtaattccaaattatgtaaagaaaccactctaatatatgaataaatgtcaacagctatggatggattccacttcctgttgtgctccgcaatcgttcatagacaacacctaccaacaaatcacgaacggtatctccgaacttggcgtcatccagaaccctttcgcagaactgctgattctgcgccatgcgcccgataaccacgtccatgaacgcatcattaaagggaaaccggaaatgttcttgtgaattgttgcgggcttggacacgcaattcctcattggcatccatatcagaaacaatctgttccaagaccttgtcgatattggtaaactctgtaccgaacttttcgttgattttatcaatcagctcagacaggggagccttttcttcctctggctttggctttccgggatgaagtttattgggcaacggctcactctgctccagcgcaatagacccttcaaaaatcttctgaacccggtaatattgcagcgatacttcatcatccagaaatataggaccgccgccatctcgctttggaagtttcttctgaagaaatcttgcgtaagcatggaacttatgcaggtcggcatcatctaatcggatgatgttggtgaggaatgtgtaggtacgaacaaactttgcgagggtagacttgaattcttcctgctcgttctcatccaaaccgttataccgatccactgccggatcaaggaaactgttgagtacgccaaaatccatattcccctgtttcttggtaggcttgaaaaatgctttggagaaagcctcaatctcactctgccaatacacacgaaactcatccaatttggatttcagttcatatacgatgttggcgtctgttgtctcctcaatactggtttcttcataatacggggcaaaagcggctcgtatatcctcggcagagtttacaaagtccagaacaaatgtatcatcttttccgaagcaggttctgttcaatctggagagtgtttgaacagcttttacaccgctgagctttttgtctacaaacatggtgtgcagcaacggctcatcaaaaccagtttggtatttttccgcaaccaaaagtacctggtactcgccgctgtggaatttttccggcagttcgctttcttttatcccgtttagactgacttcggtatattcctcgccgccatcatgaacagtcccagaaaaagcgatcaggatacccagctcattttcgtattccatctttttgatgtaacgctgaaactcctgataataccggactgcgtgcaggcgtgagccggtcactaccattgctttagccttgccgccaatcttgtctttggtgacagtgcggaagtgttctacgatgatctgggttttctgggccagattgtgtggatgcagacttaaaaatttgccaagcgccttatttgccttgcttttttcatagcggggatcatcggcaattttcttgccgattttgaaataggtatcgtaggtcacatagtttttcagaacatccagaataaaaccttcttgaatggcctgcttcatcgagtaaatatgaaaagcatggggaataccgcttgcatccggggttccaaacatctccagcgttttcgccttgggtgttgcggtaaaggcaaagaaggacaggttaggcaaccgaccatgtgtagccatttcttttgcgatttcatcctcgctgtcggattgcttgcgctcttccttggcctcctcatccgcgaccttttggagctgttcttcttccgttagcccctcagcgtttcccaggatcgccttcatttttttgctggcttctccggtctgggaagaatgggcctcatccacaatgaccgcaaaccgtttgccgcttaaatcatctaccttttcaaggataaacgggaacttctgaagtgtggtaataatgattttcttacctgtgttcaaagcatctgccagctgtgcggcgttgttgtcgattttagtcacaacgccttccacgtgctcaaactggtagatggtatcctgaagctgtttgtccaatacgagacgatctgtaatcacaatgatgctgttgaatacaaccttgtcatttttatcgtgcaggttagacaggtgatgtgccagccaagaaatagagttggattttccgcttcccgcactatgctgaatcagataattgtgtccggttccgtttgcgtagacatcggcaacgagcttacggaccacatccaactggtggtaacgtgggaagatcataacagactttttaggattctttttatcttcctgcaaatgaataaatcgctgtacaatgtccagcaggctgtctttttgcaggacttcttcccacagatacgaagtccggtaggtactgttcccaacagggtttcccttgccgccgttgtttcccttattgaacggcaaaaaataggtattgaggccattgagctttgtggtcatccacacttcttcggtgtccacagcaaagtgaaccaggcatcgagctttgaacgaaagcagaagttctctgggatcacggtctttcatgtactgacgctttgcattttcgacagtctgaccggtgattggatttttcagttccaccgtcgcaacaggcaatccattgatgaacagcacaacatctatggagttctcatttttcaggctataatgcacctgccgggtgatggagagaatgttcttctcatagagtgcctgactggtttggttcatgccgctggcaggcttgaaatagcacagagataatttggcgggagcatctacaacgccatgccgtagcacatataatgttccgtatgtatcaagatcacgatacagcttcttcagaaaacccgtttccacattctctccgtgttttctgcacagcttttcccattcaacgggctggctgtcttgaagaaactgaaagagctgcttggtgtctatggcaaattcacgattatagtcacggggattccctttgatatatccgccgtggtcaatcaggctgtattcaatctcttgttcaaatgtaatttctttggtttcgattgccattattgaccacctcctatcaaagtacaaatccaagggattagccccaccataccgccaatgatggccgatatgacagcaatccgccattcccgccgggagagttttctctcggctttttttgcagccattttgttagtgaaatagttatgaccatccactgtgagggacagatagtatggaatgttgtcagcccactgtgtttttacataaccacattctctcaattcccgaaacgtatcccggagcagggtatcctgctgcatggataatccatcaaaccgcttactccaataagccgcattgtcctgaccgctggcttggaggtcgataatttctttcagcaaagtttcgccttgcggtgacaattctttatagttcattctactgccacctttccggttaccacctcagaaatgacgctttggcggtattcctttagtttttcgatctgttctgtaatatccgcaatgatgctgtcaattcgtgcggtttccttattcaaatattcggcaatctccttttgctcatccattggaatcaaggggagaggaacctgcacaaagtttgaaaatctcaaatcttgaccatcacggataaagtttgccgtgcgctgcaatgcctgaatatatcggggagacttgaacagccacttgaaatactccggttccacacccgccttaggcttcagaacaatgtaatgccacgtgatgcaccctggaatatagctgatttccaacccgccttgaaagctacgcagactgattatgaaatcgttgggctcgacgtgcttccagttttccagtcctttatcggccaaaacaattttatagctttgcttttccatataatcttcttgagagataatgccatacttttggctggcagttagctgaacatctgtttcgtggcgggtttctttgctttgagcaaacaatgcctttgcgggtacaactttccaatgagaggggatatacccaagccactcggtgccgctatctttcagttggcaagtagtgtttataccatttgttatagctgaacatattatggaggttcggctttcctgtaataattcagacagacgcagcttattctcgatacaaatgtcgatcttcttaattacttcgtttaggtaggacacgattttgtcttgtgtcgataatggaggcttaggcaatccgagcgtaccgagtttagttctgctaattcgctgcatagtagttcctgcagccagtaatttcgcttcttctgcataacgtgaggtattcatgcagtaaacgagatattgcttgttccattcaatgtcagggcgcaagacaacgttatctacagcaacaacatatttatcatatgtatcgggtacaatacaggcacgtgcaattggttcgttaagtctcgaaatcaaaacatcgcctggtagtactgttaaacaatttagtcttgaaaatgattcctcagaaataaagctgtcaccttgttctttatattcaccggcaccaacattgcctgttgtcaaatatctaattccttcactctcgataatgtcactattaatccagtcaccatccataaaaattgagttattctctaatgcaagatatttcactttgctgactttccactcagaaggaatctgaccgatccaccgtatgcgacagcttttatagctcatatactgcttcatctttctaagacctccgccaagctcgcttggatgcgctcctccaaagccttaatttcttccataatcacagaactgttacgcagcggagtgaacttgtagaaataacgggtaaacggaatctcatagccgattttggtcttgctctcgtcaatccaggcatccggcacaaacggcagaacctcacgacggaaatattcgtggatgtcttccttcaacggcaccatttcatagtcacgaagggaggcatccgcttttttattgcctttgcggtcgattaccggtgaaccatcttcgttaagcagaggacgctctataacaattttccggtatccgaaatcttcattgtccagatccatgtagttctcatccggctcgtaggtgctgtacagacgcaccagttccgcacgattttccggactgatcatattgcgcttattgccgaggcccttgcgcatcttttcatagaaaccggctccgttgatcagacgcactttgtcttttctgcggttttcttttcggttggtcaaaatccagatatacgtggtaatgccagtgttgtagaacagctgatccggaaggccaataatagcctccagcagatcgttttcaataatccagcggcggatttcactttctccgcttccggcatcaccggagaacattggcgaaccgttaaatacaataccgatgcgacttccacctttttccggcgggttcattttggaaatcagatgctggagaaacaggaaagagccgtccgagatacggggcagaccagcaccaaatctgccacgatacccctgagaagccgcttcgtccttaatgaacttctctacctttttccattccacaccaaagggcgggttgctcagcatatagtcaaatgtctgggacttgaatccgtcctcattgaagctgtttcccaaaacgatacggctgttggtattacctttcaaaatcatatcggaacggcacgttgcgtatgtttcggggtttaattcctgcccaaaggggattacctgggtcgtgctgttcagagactccattttgttctgggcaacggacagcattccacccgtgccgcaggccgggtccagaatggtgatgacctttccatcggtatttgcaatttcgtccatatcgggatcgagcagcacttctaccatcagttcgattacctcacggggcgtgaagtgctcaccagcagtttcgttggactgctcagaaaatcgccggatcaattcctcgaacatatatcccatttccagattatcaatctgggtgtcgctcatatcaatctccgcaaaacgctgcacaaccagataaagtagattggcccttgaaaggcgatcaatgaccccgaaaatttcaaagttatccatgatttcacggacatcttcggaaaagccattgatgtaatcccgcagattagcttcgatagcgttgctgtcatccatcagcttttcaaaatcgaactggctgacattatagtaatcatgaccagtcatgcgcttaaagataggacgcttgttgctgaccgtcaaagtcttattggcctccaaaatttttgccttggaaggcgccagcacacagtcaaagcgacgcagcacagtaaagggcagaatcaccttgccgtattcgctctgtttgaaatcgccacgcagcaaatcggctatgctccatataaaattggcctgttcattgatgttcatatatctgctccctcttccctgagtctcttataccgttcgtatgagataacgacgttctgcggcttattttgcttgctgacaatcaaaactttgtcctgctcgttcacttccttaaaaatgcgtgaagcctggcccttttgaaatgatgtaatcgcttcataatccggcgtcacggtagaagcggacctctttttcgccacaaaaccacctcttttcggcaaaatatgtcgattcaattttagcacaaagtcattacttttcgcaagataaaaaactatattaaagtaatgactttttcttataaatcgttatggggcaaggctgtcacatggattaatcccttgccctctctttttcttgcatattcgagaagatctcttgcattgctggcagggtgccacgcataggcaatgaggaaatcagtatgatcgaccatataccgatttgccctgacaatagcaaccttacgagggacattttccatccccggaggatagtaggtactgtcaaatccatccggtacaggaatcgggcgctctgctggatggtacggcagcaataatgtcagttcgacttctggatgggtttgttttgcggtttttacggcttttgccgcaagaccgtcaaaacatccataacggccaacaataaattcagtaacgccgtagcggactatatgctcctcaacagcggcgcatagcactgggtaaatttcttccggtgtttctctgtgcccaataaagaaacagcttttctggctcactgaaatcattctccttttgcttgtgtatatcgttaaaattatacgattaaaattattaaagagcaacgacaaacaaaagtataatttacgaagaacacaagcaaaggggtgatgcaggtgaaagatattctctctgccataaccacatatcgagaggagcggggctggacggagtatcagcttgcagaacgctctggtttgcctcaatctacgatctcctcgtggtatcgcaagaatatggttcccactattccgtcgttggaaaaaatctgcatggcttttggcatcacgctttctcagctattcgcagaagaagattcaccggtttctctgactgattcacaaaggaagctcctggaacgatggtcaagattgagtgaagagcaacaagccgtagtgtttgctttaattgacaaaatgtaaaaaagccgccagaagcagcatcgcatggatgtgcctctggcggctttgcttatgaatcgaaatctaactgtggagcctccgttacggttcgcaggtattcttccggatcgccattcaaaatcaattctgcataggacagcggatcgttgtagatgagccagtccagttcagaccgctggaaacgactattcgccacctcatcctcaacagcggtgcagttgatggaaaccatgctgccgtcggaatatcttagttcaacgcaaccggtatccatgttaaattcacaggaaagtaatgttttcataatgttatcctccaatataaactctgttaacaagaaaaactcccgcctaattcctgttaggaatcagacgggagtttcgtatgcacccgaaaaccgtcagctaacagttgataagtgatttagttccttatcactgttaagccaatgcttccggggcttttttataccattccgccgcaagggaccgggtgatatgatgtcaatatttctatcagaaaccgaataactcatgtccgaatgggactttgaaaaaatgcctggtgccccctccggaaagcgctttgccttaagaccgtttcctccggtcctcgcccggaaactctcggcccattccggtccgtcttgggccgaagcataccgcctggagttttatccgatttcacccgcttgccgtcgcgcccggcagcctccgcatcctgctcagcggttgaactgttttttgatgcgcacgaacaggcgctcgatggcgtaggcgacgacaaagaccagcaggatggcaacgcccgccgtgccgtaatcatagccctgcaggctgttggagatcacatagccgatgccgccggcgcccaccatgcccagaatggcacattccgagaagttggtttccaggcgcattcccgcccaggccacgatctgggagaaggccgcgggcagaatggcgttgcagaagatgctcaggcggctggcgccggtcacttccagggattccactgtttcttcggggatgctttcaaagctctgggcaaaggacttggtaaagaaggcggtggtgtgcacgcacagaccggccacgccggcttccgggcccatgcccaggcagaccagcatgagcagcacccacacgggggtgggcaccgcccgcagaaaggtgaagaaggactgggtcaccaccgagagcacaggcaggcggaacacattgcgggctgccagcatgccgaacacgatgcccagcaccaggctgtacagcagggaaagcacggcgatggagacggtctccaccagagaggagaggatcaggtccatgttggaaaaatccaggtgggccaggttccagaacacgatgccaatgtccggcacgcgggagagcattttgccccagtcaacgtccaggtacatcaggctcagaatggcaagaactgccgtgcagcccataaaaaccgggataaagcggttgcgctgacggcagcggacggggattcggccgccggccgcgcgcaacggctggccggacaccggggagggagacgggaccgcttcgccggtctccaggcagggggacagttgcgggctcatttcagcagctcctttcgcagtttgttggtgatctggtccaccgcaatgaccatgacggcgatcagcaggatgatgctgagcgccacgtcatactggaagctcttgatgtaggagaacagggtcaggcccacaccgccgccgccaaccatgccgacgatggtggaagcgcggatattgacctccacggagtacagaaaccaggacaggaatccgctcaggcaggacggcaggatggcctgggagacccgctgggggaagctggcccccaccgtcagcaggctttccacgcagtcctgggaaacgtcctccatggtttccacaaaggcgcgcaccagaaaggcaaagctggtgatgcacagcgccacaaacccgacgccggtgccgatgcccagggaggagaacaggatgaacgcccacaccagggccggaatgttgcgcaggaaggtggcaaaaccgcggacaaacttggccgcccggggaaagggcgataccttttcgctgccgaacagcgacaccacaaatgccaggagcgccgccaccgtggtggaggaaactgccagcgccagcgtgaccagaacgctttccagcacgccggggatgcggctggccttgggcagggccggcggcaggaaatcctgggtgataaactcccagaactcgttgctgttggcggccagaacgccgggattgaatccggtcagcaggctgcagaccgcaaacagcaccaccgcggccacaagaaagccggtgtacagccgtttgagatcacgcgcaatcagcggaatccgtcctgtcattctgttttcctcccatcatgagattttcccgcgaggtaccgtagatgcgttcgatgacttcctcggtgagctgggacggcgggccgtcaaagacgatgcgtcccttgctcaggccgatgatgcgggtggagtactgcatcgccacatccagctgatgcaggttcaccaggcaggcaatgttgcgctttgccgtcatggtccgcagcaggtccatgatggtcttggcgctggaggggtccagcgaggcgatgggctcgtcgcacagcagcagtttgggctgctgcatgatggcccgggcaatgcccacccgctgtttctggccgccggacaggtccgacgcccggttgtaggcgtagtcctgcaggcccagttcttccagaaggtccagcgcccggcgcttgtcctcctcgctgtacaggcccagaacgcctttcaggccgggcatatatcccaggcggccgtgcaggacgttctgcagcaccgacaggctgtacaccagattgtagttctggaagatcatgcccaccttgcggcgcagggtgcgcagatttttgccgtgctgctgcgacacattgctgccgtccagtgtgacggcgccgccgctgacggggatcagggcattgatggcccgcagcagcgtggatttgcccgaaccggaaggtccgatgaccgagatgaactccccttccgacacggtaaactgcacaccctgcagcgcatgcacgccgttgggataattttttgtcacattgtcaaaacgcaaaaacggttccatacttgattctcctgccgcgcaatggatcagaattcgttgatgatcttgttcagttcgatgatatcttcgtagtcgctcatgtcgcactccacgaagcgggcgccggggaccttgatgacgtcggtgaagtactgctcgttgtcatagctggtcagaaactccaccagtttgtcgcgggtcgcctggtccacgtgctccgccacgacgatagcttccgccgggatggccgcggattcatggatgatcttgatgtcgctttcggaggcgttgccgttggcgatctcggaggcgaggatctggtcggagatgggtaccacatccacgtcgcccttgatgaccgcctgcaggccggcctgatgggaaccggagaagctgaccgcctcaaagaaatcgccgttggtatgcagcatatccgagttgaggttttcatccgggaaggcctggatgatctccgccgtgggcaccaggttgccggaggtggaatccgggtccacaaaggccatggtcttgcccttgatgtcctcaatggaattgatctcggtgtttgcgctgctggtgatcaggaccgagtggtaaatggccttttcggggtcgccgtcctccgccttcatgacgatgggctccaggtcggtgcgctccacgcccagggccagggcctgggaccccatgtaggccatgtcggcgctgccggtgcgcagggcttcgataatggcattgtagtcgctggcctggatctcctccacctcgcagcccagaacggcgctcaggtcgtcggccaggccgttgcgggcgtcggcggcttcggtgttggactcgttgggagcgtaggcaatggtaaagacgccgtcctcaccgccggggttgctctcccccgctgccgaggtgttgttggccgtggcggtgctttcctgtccggaggcgccgcagccggtcagcgcggcgatcatcacagaagccatggtcagggcgatcagtttctttttgcagttcatcatacagcacactctcctttatcagcgcatacagggaacggcattcatttggtagatggattccagcaaagattcgatacattcgggggtcagggtaacggggttgttgtcggcgcggcccttggtgatgcccagggacgccaggtgggccagatcgctgtggagaacgccccagccttccagcgaggcaggctgtgcggagcggagcagcagcccggaaatgcggcgctgcagcatggcggcatcctgcacgcccagggcgtccagcagagcttcggggtcgtccacggcggtctcgttgagggccagcacgggggccagcagcatggccaccgccgccccgtgggggatgcggtagtgcatggtcagcgggtaggaaatggaatggcaggccgtggttttggtgttgctgaacgccagcccggccagcatgctgccccgggccatggcgtcatgggcggcaatatcgccggagaacaggtcgtcgatgctgcccatgatggtgcggatggcttccagtgccagcgcccgggagaccgcgttggtgtggcgggcccagtagctttccaccgcgtgggccaccgcatccagcgccgaggagaccgccagtcccaccggcatccccttggccagttccgggtccaccagggccgcccaggcgtagttttcccggctttccagcgagcgcttggtgtcctgttcggggtcccagatggtcgcccagcaggtaacctcgctgccggtgcccgcagtggtgggcacgccgatccagcgggccgcgggtttcaggccgccggcggcgatgcgctcccgcaggtcgttcacgcctttcagggggcagccgtacaggcagcacagggattttgccacgtccaggatggtgccgccgcccacgcccacgactacctgcggggcaaagtccctggtgtcgttccaggcgtcatacagctgttccaccgtggggttggaggcggtaaacaccaggctccgggcgtcgaattccccgccgtcggccagcagcgccgacaggaccgggtgccgcaggacctccttgccccaggcgatgaccagcacccgccggtcggaccggggcagggtgcgcagcagatcgggcagccggctcaggcagccggggccctggatggtatgtaccggattgtaatagcagttcacagcgaagcctcctccgtatcagccagacgccggttcagcgtttcgatggcttccggcagttcccggatggtatcgatgaccaggtcggcgccggcgtcacggtagcgggccgccgcctgttccttgcgccgggccagctcctcggcgggcatggtgcggtattcctccggggtgaggcccagcagattggagccggtcaggatgccgatgctgaaagccccggcatttttgccctcccgcatatccaccgtggtgtcccccaccttgaccacatggcagggcgggtagatcttcatgcggcgcatgcactcgaacaacatgaaggggctgggacggccgatgcccgtggcgtcgggggtcaccacgcagtcgggggtgtagccgcccgccgcggcccggggcaggacctgctccatcatccagtcgttgtagccggtggtggaaccgatcttcagaccggcgctccgcagggcgtccaccgtctccacgaccccttccaagggatcgctgcgctccgccaccacctcgtgcagggtggcttcaaacttttcgtacagatcgtccacatccgcctcggtccagtcgcggccgtaccggttctgccactggctgcggccggattcacaggacagcagctcccggatgtgtgccttcttctccagtcccatgggacggttgatctcttccttggtcagctgcacgccggccgcccggaacacccggtcaaatacctcgctgggagcgctggaaccgtagtccaccgtggtccccgcccagtcaaaaaccaccatttcgattttgtgattgccttccatcaggagcacctcttgtcgcatacattcttttgcagttcattgcagctttttgcttgctacacccgcattatacggcgcaaaacgcagcatcatcaagcaaaacgcggcaaatattatgtaaaaaaaccgtaagagcgccctccccacttgcgggagggcgctcttacggcgttggcgggtccgtgtcaaagaatacggaaccctttcttctgatatttttcccggatctccggggcgatgtggtcgtccatgaccacaaaatccacctgttcggcggtaaggaccttgcacttggagcactggcccagcttgctggaatccatgacggcaatgaccttgcgcccgttggcggcaagctggcggatcaccccgatctcgttcatgcggaaatcggtgtagccgtccttgtagttcagggcgttgatggaaagcagcaccacgtcggggtggaaccgggcaaaatcctgctcgcagaagctgccgtaggtggagcgctcctgggggtccagcattccgccgatggcgatggtgcggatggaggcggactgcatcagcacgttgagggccgcgcagttgttggtcaccacggtgcagcgcagccccgcggccaccatctcctgggctacaatggtgtttgtggtgccggagttcagcgcaacaacgtccttttccttgatatgggacaggaccttgcgggcggcttcccgtttcaggtcgctgttgacgatctcccgccccgtaaagtcggaaaccagcacccgggattccggcaggcaggcgccgccccgcacgcagcggatcagcccgctctgctccatgtttttcaggtcacggcggaccgtatccacggaaatgtgcagctgacggctcaattcactgactttgaccgtggactgcagctgaagctgctgcaagacatagttttcacgttcctgatacagcacttgaatctccccttgctttgccgcaatttgctgcttttatcctaccggattttgcgtcattttgcaaggtgcagggctttctcctttttccttgtcccaatcgtcatattgttccttgagaactgctttgttataataattatgaatagttccttttctctcatacatgccgttttttcggcgcattgctgccgggaaaatgagagagggatgtgcatcgccgtccatcggccaaaggagtgtcgttatgaaagatcgtgaaaaagaggaccggtcgccatatcaggaatcccccaccatccaattgaaatgggaaatttctgcttttttaccggatatcgacttaaaaaatgacaatccctacttgatcgaatccttccgcccctccacactggcggatgcagatcccgctttctttcaagactactggagcgtcccagaacgactgcttgacctggcttggctgtttgactgcgccaccccttcccaggctccccaagaaggctgggaacaatccagcctgtttgatgatttgccgcaagagaacgcagccggcagcgaagtcatgtctgacgtcatgcttctggaatacaattttcaacagattgtaggcgtttttctgcggactatccagtacagtcagacatcgttgaaaaaactgtccaacatgccttccgacgtggaggaaacctcctggatggccacatgccagcggattttgcgcttgtccgacaatggagattatccgcccagccagcttcctgacctggaacaggatcttcaggagttgaaccacattgccgaaactttaccccagcgatacctgggcgaatcccgtgctgccgatctttacagcaccgcccgggcatttcccaaagaacgccccgaaacatcctctttttcaagcgattccaacgatgagcgtgacgaacagattctgaacctgtgccacaaacttctgagctttttcggggaccattcctggcgcaccgacaaccaggcatacaagcggttatcaaacattcgccaagcgctgctgttgcttcatcgctttttcgcagcggatgacagtaccccatccccattgaaaaggaccgtcatcacggattcctccttttcgaaagaactgtggaactccatccagtatacagcagatcagacctgctcttacatcaacagcagtctccgtaacgtctctgccagggagtttactgcccgggtgcgtattgtaatgaataccatacaaaatctgacggagcaactgaccctgcttccccccgtcaaaaagaagttggatatctacctgaccgatcaaaagcgctgcattgccatgctgcagcgcgcaaacggcaaacggttgattgccttcagcggctattttgactgtaccgatcgcaacctttgtcgccatttgagtccctcggcccccgttcccaatttggtactgatccatgcatttgaattcatctgccgccgctggggagcacaacttgtctcctttacccctgctttgactcagcatatctaccgctactatctggaccacaccctctcttttcaaaaaaggggtcccctgcactcagatatgtataacacccaaaaattccccgcggtccggaaagattattcctgctgtgaaagaaaaattctggctcatatggaggtccatcatactccggttttcggtccgctacatctaatcgttaaattccagccgtgcatgcactgctatgccgcgctctcccaatggaagccgtcgtttccgggccgctgtaaaagcctccccaccggcaaaaggttgttcctttccggccaaacacctctgacacagcggaaaccgtctgtgccggggttcactttggagctggattatccggaccttgatccacggccttatgcccctgcctccggccgcccgcggcgcggcactcgataccgcaccccataaaaaacagcatcccccgcaccggaaatccggtgcgggggatgctgtattccgggtcagacccggtgttttgtgttatgggtggaatgcttttccgtcgtccggtccggaatttccgccgcaagaggtcctgtgccggggatcactttttgccccgtctctttctgatgatggggatggcgatcagtgccgcaagcgacaccaccagtgccaccgccacagcggccagcgggaagctgtcctccgtctgcgggatggtcaccaccggggtcggaggcgtgctgccgccttcctccggcgggtggctgtcctcggggaagcgctccttgcggtattcgttgataaactctgccgcatcgctgcgcttggcgccgtcggtggcaaggtactcaacgcttgccacttccagctccttgctgaacagcttttgggccaccttgacggtcagcgtccaggtccttgcatcgtaggtatatcccttgacggtctcctgcttttccacaatggtgaaggtgtagatgcccgccgagcggaaccggatctcgccaaaggtcccgatgcctgcgccctccaccgagatctcggtcttttcaggcatgaacaccgcgttcacggggttctgggtcatcagggtcatgctgaaatggaaggtctgcttgccgtccggggtatcgccggtgatctgtttgcggaccacgggagcatagacggcaaactggggatcgtagttgttcacaaaggtcgcctgatcgtcggaatcggtctggcccgccgccgtgtacttgtgggactgaacggtaatggcaccgtccacgtccttggtgaccacggtcagcgtccacttggtcttgtcgaactcatagccgaagccttccagcgtcgggtcggccttttcggtgatggcaaaggtgtaggtgccttccttcaggaaccggatggccccaaagtcagccttgcccgcgccctccaccgtgacggcggtcttggccggcatgacgacctcatcctgattgccgccggtcagcgccagttcaaaggtgaagctgtcgcccgccaccggggtctcgctgcccgccgcaaaggtcttttcaacggacggggtgtactcggtgggcgctgcggcatagctgttttcaaacgccgctccgttggctgcggcgacccagttgccatcctgatcctgcacgaaataggccacgcttgcggtcaggttgtggttgatcgaatcctccccgacggtgacttccgccttatacatgcggctgtcgtaggtgtaacccttgtactggttgttcaccgcctcggtggggatcttttcgcggatgtaataggtcaccgtaccgacggcgttggccgtgatattgccaaacgtcaccgttccgccgacgttggccttggtctcgatgacctgctgggactgatccagcagttcaaactggaacataccgtcggtcagggtcttgccggtcagggtcttggaagcttccaggtgatactgcaccgtgcgggtgttggtgacttccacttcctggttcaccgcagtcacggtatcctccggaataccgagcacccatgcgggattggtggtgccgctgccgctgtagttgctgatgacgttctggtcattggatgcccgtgcaccgtccaggcggaagcccgcgccggtcttggtctccacaatgacgtaagcctggaaccagttcagctcacccagacttgcctggccctgagtatcggtggtataggtacccaccagattgctctcatccagcgctgcggtgttggcttcctccacgctggcaaagggaccgtataccttgaactctgcgccgggcaccggggtgatgccgtcgtctgcggccaccttggagatggtcacattgcggtacagcacaacgcccaggtccttggtgttgtcgtacaggttatcggtggacgcatggaggtagaagcgctcggacacgctgttcagtgcactgccggtggcagaagcatcctgatagttgttgtcctttgcctcgttcgcataggcgcccgtgctctgcagatccgcgggttcacgggagtaaccggtggtcgtgcccagggtggtgggcttggccagcacttccacggtggacggaatggtggccaagatgctgtacgtgctgggagaagtgcccttcaggtacagcgggttcagcatgctcagctgaccgcccgtgccggaatagagctgttcttcgcttgcgccgtcctgcttgttggccgaatccaggccgtcgaacacgaattccgcattgctggtccagtcggtgtctttggcgaatgtcttggcatcgaccggctgatcgttgttgcccgcatagacattgagacggatttcaacgccgttcagcaggcgctgtaccatctggttctgagagaagttgtccacggattcgcctgcatcccagacaccgtccgcatccttatcgatccagatatgtccgcccaccttgacaggtgcgggcaggaccgtattggataccgagttggagctcagagcctgtgccgccggggtggcgccgtcaatgccctgggcatcggtgtacttccagaaattgcagacgaagttgttgaccgcattgctccaggcacggtccacgacctcttcgtcggacagctgtcccacgttcagacggtattcgatgatgcagctgtccttgctggaaagggagatggcttcgtcctttttcaaggccaccgcaaaggccgtcacgctggcgggtttggtatccgaccagccctgaggcagagcggtcgtgtcgtaatgcagctcggtcacctgggcgtacacatcgtcgatgttggcttcggtaatggggtccgaatagtagaacaccctgtactgatcggtgctcagctgcgtttccttcgcgtttccgtccaacagccggaccgccgtaatggaatcaaaggacatggcccattcgctgccgcggtcggtgttgctgatggtcttgtcgcccacaaaaggcagaacatccaggaaggtgatgttggtgtaatcgtaggtattggactggttgctgaacatcagctggtagtccatatagccgttgttgttgacggtggacagacgatccgaggtaaagcccagatcttcggagcggtcgccccggccggtcttgagaagcgtggcttccgaagatgccgaccagttgatcccctttgccgcggagatgtagccgaaattctcaaaatggctttccgccaggatctcccgcagcgcttccagacgttccgtaccctggagcgtggtcaggaccgcgtccagatcgccgggccattcgccgctggagttcttgaacgaggtggcacgggggttatccgcgctcttgacgccctgctcacggctgccgaccaccacatagttggtgatgccgcttccgtaagccgccaccgcattggtggaccggacttccagagaaacctgggccttttcgcccggtttcagttcgccgctgaggaacacgaacagcaccgtctcgccgtggcgggtggaagaacggacgttttcgatggtcacgccctcgggtgcgctcaccagtttgacgttgccgccgtcaccgttgagcaccgtgccctggggcagcaggtccgcaaagaacgcctgcttgagggacgccttggcctcgctgctgttggagatggtcacggtgtaggtggccacgccgccgtccagggcaagggtaccggtatcgcagtccttatccacgctgacgatggcagtttccagcgagccgaaagtatttttggcgctgtatgtccgggtaagttcggtgggattttcctgctgcacgccggtggtgctccacgcacggtagcccaggtcgatccgggcgatgttggtcacctcggtgatggcctgcaccgcctcgccgccttcctgcttgtccatcacgatacggacgatcagctggccgggggtaaagttctggcccagggcatagccggtggctttctcaaattcgggagaactgtattccaccgtgacatactttgccttggtggtggaggacagccataccgtctggttttcctggctgacatccaccgtctcggccttgatctgctgatcgttgaagtcgtagaaggtcaccgtcgcctggatggggaagtcgccgtcggcatagttgtcggtcttatgggtggctttgcccacaaggatgcccgcaacggtgtacttgtccttcaggtattcgtcgaaagcaaggtccgtggtgccgtttttggcagtcaggccggtatccgtcaggacaaagctgtccagggggtaatcgttgttgaccgtgggggtcagggtatagcgcagggttgccggctgcgtgagcaggctgggattgctggcgccttgcagcaccgactttctcagctcgggctggacctgagcgttcaggtttttcagcgtcacgatctgcttgtcggtagcgccctgcgggactttatggaccacataccagacgacctgtttgttgtcccggatctgcggcatgctggagtcggtctccaccacaaggtaggtcttgccgcccacgatcttgctgcccaggtcggaatgagtcgtcttgtcggcataggtatagtgggatgtgctgtccgttccctgcttgaccacctcaacatccgacagcagcggggtattgttggccatcaggtcctgtacctgctgctgagtcagagtcgcgggagtgttgtcaggcacttcatacacgctgaccgttgcagagggcgcgggttcggcattgggatcggcagcgtcctgcttgcggatctccatctccacataggggacgttgtaagcgttatacgtgtagtctttgctgacgaccagggacgcgccgttgtcgatcaggtagtaggtcgtggtgccgtcggactcggtggtcatggcggcattgccgtcatacaggccctgcaggccggcatagccggcggggcgggtctcggtcacggcatagaccttgccgctctcgacggtaaagctgacaacgccgtccttgtcggtctgggcggcggtctcctgtttccagctgccgtcggtatcccggctgtacagcgtgaaggtaacgcccgaaagcggcgcggcggcagtattctcccgcacattatcgtacttggtgatgcggatgttggaacccggatagttggggaagatgagctgttccagcatggccgcgtcatccatggaatcgttccagcttccgtgtccaacgcgctgaccgggcacgaccgtcacttccgcagcggaatggtccagcacgtacccggacggggcatgcagttcttccagccggaaggtattgccgttcaggtcggtcaggggcagacgcacggtgtattcgccggtgccgccgcccttggcagtccattttccggtcgtgttcgtctggaagtcatcccccgccttgcggtaggcgccgaaaccggcgttatccagcggcgtgccgttattgccgtccaccttgaggatggtgacctcggcatacatataggcattggtcgccgtaatggtcgcaccgtcgttgctgttatccggcatagtgaatttgtaatagccgttttcttcggacacggtcaggccgttcttgcccgttacgctcttcagctggaaatcctcgccggggttgctttcctgaatataataggtggccccctggctcaggccgttaaaggcggcggaaactgttgtgccgtttaccgcaccgcctgccaccttgacagtctggctggcgattttttccttggccgcattatacagcgtgaaggtaaagctgtggtcgccctccaccgtcagctcgcccgactcgatgactttttccaccgtcaggctgacctgcttgggatcggcaaaggtgacttccacactggcggcatccttgtcggcaacggtctttccggtgatggtgaccgtcttgtccatgccgccggtcagcaccacgtactgcggcgttgtgaccaggtcataccccgcgggggccgtggtctcggtgatcttgtagacgccgggctgcaggttggtcagcgttgccttgccgtccgcgccggtggtcaggttgctggattttacgctccagccgctgtcgctcacggtctcttcgccggaccaggtgttaaaagccttgtactccaccttgaataccgcgggagcggtcaccgcatcgccggtcgccttgtccgttttcaggacggtcaggctgcccagcaacgggttttcaactttcagctccgcttcggtgatgccgtaatcgatcagcgtgatgctgtccgtcacgaccacctggtcgttgcggactaccgtggtataacccaggaaaatccccttgccggtggtggcgaagtccttgagggcatacgcatcataggtatactttccatccgcataagcagactggaaatacttggtcagatagctgttggaatgtccggagatcgcactttccgacaggacgtagacaccggtgcccacgttgccggcaaaccgggccacaccgtcagtccccgtccgcgccgtcaggccggcgccggtcttgggcctgagggtaaaggtaacgtttgccagggctgtgccgtccgtgccggtctttttcaggctgagggacagcttggccgggttgtacatggagatctggacgttgtcgtccagcacctggaagtagtaggcgcgctcctgaccatctacggtcgagccgtcatagatgttgtcataccccgcattgggaaccgtctcgatgatgcggtagctgcccactttcaggccctgcgggaagctgaacgtgccgttttccgtggtaaaggtcgcggtgggattcgttccctcgtaattgggatagagataatcctcccacttggtaccgttataccgctggatcttcatggtgacttcaagaggcgtgcggccgctcttgcccatgaaatactcgtccagttcctggctggtcttgttcatggtctgctcgttggcggtgtagccgtacttgttgatggtaacggcaaagttatccaccggccagttgacaatgcggtactgctttgcgccggtcacttccggaaggagggtgtattcgcccgaaccggtttcctcggtgggatacagcgcccagtcagtgccctgcgtttccgcaagatccacctccgtctctgcgcccttgacatagtaggcgtcgttaaagacctcggtggtcttgctgccgtccttatcaaagtacatgagcatccggtagccggactcgggggcgttatagccggcgggagtgccggtctccaccagcatcacgcggatataaccgttgccattttcatcggtccaccagatatcctggtcaacgccgtcggcattgttgtatttctcggtgagttcatcccagctgaacgccttggaggatgcccaggcagtcaggtcctcttcgttgccggacaggtcgttgtccaggccggtggtgatggtgtccagcttggtgacggtggtgccgtcctcgtggaccaggtacaggtcaaaggtggcgttgcccagcggggtatagttggtcagacggttgccgtttgcatcgatggcgcctgcccacttggcaatgcgcacggtggagaacatggctccgccgccgccataggccgggaagttttccgtctccctgtccgtcacacggtcgtccacatattcaaatacctgcgtggattttttattgggattctcaagagacgtggaatcgttggtatattgggtgccccggcgcttgatgagcgtgatctggtgttcggggtcgatccttgcaccgatgccgctggttttctccaccagccagtaaaccacgttgtcggagactttcaggatgtcggtggcgaaccagccatcctggcgcacaccgttttgatcgtacagcgtgccgctgctgtaactgccgatgtgggtgtacttttccagatgctcactgtcgaaagacagtaccgcatccggcgccgtatctttcggcaggacctccatgtacagctcaaattccgcgttgttgaccacgcgctcctggttgtccaccacgtcgtcgggagcgtcggggtcactcgcatcctcccggacgaacttcaggatgttcagctgtgcccagtgctccacgttggtcagcttgtcggacaccacatccagcgggttgccggtattggccgccttggtgacatagtagtagttcttcacctgttccgcagacagcgtttcgggcggggtatccggatagtccgccgacaggtatttcttgccgttgctgggctccagatacgtaaagtcggcttcgttggggatggaatactcaatggcgatgtattccttatcctgggccaggccgttgaaggtcacgctgcccaggtcgtcggtggtcagcatctccgcaaaggcatagctgccgtcgctctgcttctggtacagggcgatctgcgcaccgttcatcaggtattctttctgggtgaagcggaactcccaggtattgtagtagaccttggtcacctggaaagacacttccggcaggttgacgatggtcaggtccttgccggcagtatccgtggtgacggtcttgcccgcttccagctccacggtcagctcggtatcgctgacggtgtagccattgggcgcagcggtctccctgatgacataggtgatcttgtcgccgttttcgtcatagatttccaggccggtaaaggtcactttgccgttggtggtttttgccgtcttgaccggctcactttcgccctgcttatagatggcgatggtagccccgttcagtgcggtcaatgcgccgtcttttcccttggcctgcttggtcacggtgaccgcgccggtatcggcgtagttggtgatggccgtggtctgggtcaggttattcttgtccttgacctcttcgaccaccaccgggccgaagtagaagctgtcggtggtcgcgtcgtattctcccttgccggggtacagttccgggtgttcggacgggtccagccggttggcgtcgtccccggggacgacctctttcagccagtaggtgcctgcgggcaggcgggtggccgtaccggatttgatggtcagcggggtggtattgtcatagccggtgacacgggtataaacgccgtctgcttcggtgtagacttcaaatcccacgccggtcagcggctgggacttgccgtcgctgcccaccagagttttattgatctggagtttgggatcgggatggttttccagggtcttgatgatgaccttgtaatcggtatcgccgtcaacggaggaatagtccgtcaggtcgatggtccggtagtcggattccgtcgcgtcgtggtagccctggggaacggtggtctccttcacccggtactttttgccggtctccagccagacggtcacgccggagctattgccgatggccgtctcggtgacgactacgtcgccgcatttgtcgtccttgctttcatcataagcatagatggtgaactttgcgccggaaacaaaagcctccgtcacgtcgtccgccttcttgatgatgacgggcagggtctgcgcatagtttttcaccgtggcgctctgggacaggctggccgcagccgtaccgtccggggaggtaaagtcaaagggaccccaggcccggaccgtcctggtgccgtccccgtccttcacggtcaattccacggtaccggtttcgtccgcggcataaccggcggggcaatccacctccaccaggtagtagagataggccttgtccgcggcggcggtgcgttccaggtcagtaaagctggtgctgccggtgaaggcgctctcctccaccagttcggccgcagcagtgctgccttccacctgacggtagagggcaaacttggtctgctgtgcggtctgcttggccggggtgccgctggcgcccaggcggtaaaattccttggtcagggtaatgctgccgttgcggtcgttctgcatgatgacctgcaaggcttcggtggcaggcttgcccacaaactcggtgagcttaaacggctcggaatacatctcctttgcacccgcgttgccggggtcatgccagccttccggcaggatctccttaaagcggtaggtgatgaccttgccgtcggcatcgtaggcgggtaggctgcccgaccatctgccgttctggcccagagaaagcgttccatacccgtccaccgtggtaaagttttcaccgtccgtggagctttccagcgagaacttgtcctcaaagacccgatagtagttcacacccacatccacatagcggacgccgttaaagacctgcttttgcagctgaacaggggccaggttggagttgttgaccactttcagggtaacgtcctcattttcttcggacacttccacggaatgttccgtactgtcgatgacatagccggcgggggcgctgatttccttgacgacataggtgccgtagggcagacggccgaaatgggcgttgccgctggaatccgtcgttgccttggcgagttccttgccggcttccacctggccttccttatacaggccgaactccgcgccttccagagcggtcgcggtctcgcccaggttctggccgaacttctggacggtgatatagcccagctgttcctcgtcgtagaagtccgcggtccccggcttggccgccgtgaccgtgagggtcttgtcgtcggcattgttgacgccgccggtcatttttttggtgttggacggcccggactcctcatggaccacgtaggtgccggggtccatgtagatgctgatgccgccggtggtgctgttggcatcgccggtcccgttggggtcgatggtcacggtgttgccggcaagcctggtataggtatcgccggtcttgatatagatggtggccgcgctgccgtcctccttggtgacggtgaaggtggcagccccggtgaccgccgtatccgatgcaaagttgttcttggaataggcggtcttgttgccggagatgtccaggatgtatttgttgatggtgattttggcaggctgtgtgacttcgcccgcctcgatggatgcctcgtcggaggcttcggccgcgctgccgcccttgagggtataggtcagggtcacatcgttggtgacgttcagcttgtcctgcttttcgtcatagtagttggcgataaaatccgcatacgggtacaccacttccacggtgtacttggaccaatagggagcggccggcgccacggaggtgttttcaatgcccttgccctcgcaggtatccagggggatggtgacgggcgcgccgctgccgacctccaccgaaatgggggtcttggctccgaattcaggggtgatggtaatgctttccgccgtgatcgtttctccctcgcggttcaaaacctcggggagttcggtcagggtgacattgccgtcaaagggcacgcggccgggacggccgtaggtggcggggttggcggagatcgcgttattgcccgtgccgtcgtccaggcccaccgtcagctcaaaggtgaccgtgaccttgctcttgtcggcattgggcacggcgctgaccgcacttttgtcaatgagccagcggtcgtcggtgccggtgaccttgtcggacagaacattggccgtgatgctcttgtcatagctgaggtcggagggtttatggttggccgggtccatacggtccatgatggtgaaggaagtttccagcaccgccgggaccgagaaatccagctcttcaccgatgccccgctcgccgttgccgtcaacgcgcagcgggacggtgatcatgccgttggggctggatttggcatccagcttgtcattgagcaccagcgtccacacattgctgccgtccgacggcgcaatgacgtcattcacgttctgcagactgccggagaccccctcgataatattgacgccttccggcagggtcagaaggatctttgtattatcgtatgtatcgaacaggggttcctgatggctggtatagctgtaagtggcagcctgtgccagtgtccaggagatctgcaaattgaccgtaccgccggcctttaccgtctgggcgtcatcctcccagctggtggccagagtacccagcgttgcggtgccgttttcaccgtaatactgttcggccacggtcttatagccttcggtgtctgcgcctgttcccgattccggttcatcgactgcaaataccggcacaccgatattcagcagcatcgctgcgcacagtatgagcgagagcaaacgttttttcattctttcatctcctcacaaatttccggaaggcatgaccaaaatgagcgcgtctcatcgccggcctgtctgcccggaaagcgaatcctgatttgcgtacacttttacacatgatggcctgctggcgggaaaaacggggctcccggccggaaaccctcagggactccccgcccgcaaggcattttttaagattacattctcattttctgtccgccattcgcggaagaaatatcctatatgccgtttttcaccccttccgaaacgccacaggatattgagcatttttcgacgatatgttataatattttccactcgtcgaaggggaaccgcacggggttcccgctccacttcataatatttattatatcattttttagtatttattcgcaagatgtgtgcactgttatgacaagattcagtcgcttttcacaaagtttctttcgtatgttttgtgcagtttttttccacaatatcggcaataatacagcaaaacagcggcacggagaaatctccgtgccgctgttttattgctgtcttttattcgctttttgcagaagctccattcatcccgccggggtgccggcggacggcctcttaccggcacccgccgatgtcgcaggcgcggtgctccacgatctcctcctcacggaccgggggctggccgatccaggacagggcctcgtcccggtcaaaggttttggcgccgtcctcccgcacgaacagcggcacaccgatgccgcccttttcccgcaggggggcaaagatggagtcctggtcccggatggccaggaactcccgcagattggcggtgttctcggtaatgtccacatactccgcttcaaagccgcggttttgctggatggcgcggtaattgcggcagtcgatgcagatgggggtcccgtatactttcatggcggcattgctcctttttaattggtgttttgtctgtctttattgtatccgcgcccgacttccggcgcaatatttttccaaagattccccctttccccggacgggcctggcagcggggtttgcggatttccggccgccggggagggggacagaattcaaagattctacgttctttattcaaaggaattcattgacggtgccgtggcttttgcgattcattataggtaacagatctttgcaaaagaaggaggatatttcattgacaaaagccactgcttcccccaaagcctgggccgtgctggcgggcatggtcctgatccaggccggcatgatgggcgtgatcatcaactgcaccggcatccttttctccgccgtgctggaagactgcggcttccgcgccggggatctgtcggtctactacaccatccgctccctggcctccgccgccgcggtgggcgttacctcccggctgttcttccgatacggcggcaaggccgtcatggccgccctgggcgccattctggccctgtccttcggcagcatgtacttttttgacagcctgtggcagtggtatctgtccggcgcctttgcgggcatcggcatgagctgcatcatggtcatcatgccggtggtgctgaacaactggttcaaagcccacaacggcctgatcatcgggctggccatgtcctcctccggtattgcgggggctgtgttcagccccctgtgctccgccctggtcaccgctctgggctggcgcatggccgccgtggtcaccgcctgcatcggcggcgcgctcatcatcatccccagcctggtgctgctctccatctcccccgacggccgctccgcacagcccgccgggcgtcccgctgccaccgtcaaggcggcggcaggcccttccaccgtccccggctgggtctttcccgcctgtctggtggccctgatcggctccggctgcctgacccagttcaacaatcagctgcccacctttgccatgtcggcggggtatcccttggcggtgggcgcggccctgaccagcctttccatgaccggcaacgtggcgggcaagctgtgcatgggcgctctcagcgaccgcatcggcgtctaccgggccatccgcggcgtgctggccgccgtgggtacggtgatggtgctgttcttgctgttcaaacagttcgccccggttttgtacctgggttccctggtctacggcacggtatatgccatggccaccaccatgccctccctgctgctccttgacctgtacggcaaggaacagtaccagggcaaggtcagctccctgcaggcggtgagcggcctggtgttcgcgttttccagctccggtttcccctacctgtacgacctgaccggcagctttgacattgtctttgtcctgggcgccgcattgtgcgccgtggcctttgtgctggcgggacggctgcagcgctacgctgcccgccgcccggcacaggcctcccccgccctggaacaggcggcctgaacctttgccattccctcctattttctccttgcaaactccacagcgaaagcagcgggagccttccgtccgggaaggcccccgctgttttctttctatggtattatggattacgcttcgccctccgggtcctgcgtttccggggccggcagaagtcccggctccagcatatgagtcatgcggtagtcccggggggagaccccgtggacgtttttgaacgcccgggaaaaatgcagctggttggcataccccacctggccggcgatctccccgatggtgcggcgggtctctttcagcagctgggccgcccgggccatgcggtagtgcagcaggtaggcctgggggctttcgcccacggcgtcccggaacaccttgccgaaataactgcggttgaggccgcacaccgcggcgatctcctcaatggaaatgtcccgctgatagttttgctcaataaacgtcagagcctcccggatgtaaaagtcccgcaggcggcgctcactgttgtggcggcggtccgccgacgactgcaccagctggtccaggaagagaaacccgtgggcgatgaggtgcaccgggctggcgtcgctgtggttgacgatgtacatcatctcctcctccagcaggcggccggcctcggcgttccaggcggtgtaaaccggccggctgccgctgatgcccgccaggttcaggctttcatgggcgcgcaggccgtcaaattccagccaggtgtactcccaggggtcctcctcgtcggcgcagtaggtggtgatctgtcccggcaccaccaggaacccgtgccgggcggtgatctcgtagaccttttcgttggcatacagccgccccttgcccgagatcacataatggaacaggtagtgatttcgggcgtgcggcccgtaggaatgggccggagcattgtgctcccacccgaactgatacaggttgagatcgatgaaacgctcgtcccgaaagacgtggaatttgaactttcgccccttatcctgctgctgtgccataacgaaactgcacctccttctcacattatataccataatgcgtctagacttcaacaaaaatgcaagttttcatggaaattggcatctaaaaagcggcattgtggtattctatgccctgccgtcaaattgtataatgaatttgcaattagaggtttgaaattgtgcaatgtgcacaatgcacaatttcagcggtcttttttcgtcagtttgacggaagggcggccctcttccctgttttgtcaacacggccgacatgacaaaccctcgatcgattgtacccaaaccaaaggagactgatcatgaaaaagttgcatcgtattgccaccggcgctcttgcggcgttgatggcggccgggctggccggctgcgccggggccgacgacggcaccgtcaacctgaccttccagatctgggacgtggcgcagcgcgacggcatgcaggccatgtgcgacgcctacacggcccagcaccccgatgtccacattgaggtgcaggtcaccagctgggacgaatactggaccaagctggaagccgcggccatgtccaaccagatgccggatatcttctggatgcacaccaacgagatcctgaagtatgcggactacggcaagctggcggactgctccgacattgtggagacggagcatttctccgagatctccctggccaacgccagcggctcggacggcaagctgtacggcgtgcccaaggacaaggacaccgtcggccttgtgtacaacaaggaaatgtttgacgccgccggggtggcttaccccgacgaaaactggacctgggacgacctggtggacgcttcccagaagatctacgacgccaccggcaagtacggctacatggcctacggcgacgaccagctgggttactggaactttgtctaccaggcgggcggcagcatcctgaccgaggataagacccgggccaacttcaccgaccccgccaccaagaagggcatggaattctacatcggcctgcagagctacgaatggtgccccaaccagacctactttgccgaaacttctcccggcacggccttcttctccgagaagggcgccatgttcctggaaggtgactggaacatcctgaccgaactgcagaactaccccgacatggtgggcaaatgggacgttgcggtcctgcccaaatgccccgatcccgtcagcggcgacggccgtgcctccatctccaacggcctgagctacgccaccagcgccaccaacaagcacctggacatcgtcaaggacgtgctgaagttcttcggcagcgaggaaggccagcgcatccagggcgagagcggcgccgccatcccggcttatgagggcctggaggacacctgggtcggcgtgtttgacgagtatcccatcgacgtgactcccttcatcgacatgtttgactactgcgtgcagagcgtcaacaatgccgcccggcccgagtggaagactccggtcagcgacacgctgttgaagatctacaccggccagctggatctggataccggtcttgagaccatgcagcagatcgttgatgaagccagtgccgaatattacgaggaggatgcgtaatgcaaaagacatccaagcttgcccgcgacggtgctatgtggggtctcatcatggtggcccccaccatcatcggtctgctggttctgaacatctggcctttcatccaggccatctacatgagcttttccaagtcgctgcccttcggcatgtttgagtttgagggcatcgacaactacgtggagatgttccagaacgtggaattctggaaagcgacctggaacaccatcctcttctgcatcctgacggtgcccgtgggcatcttcctggctctgctggtcgccgtgctgctcaacaccaagatccgcggccgcaccaccttccgcgccatcttcttcctgcccatggtcgtcgctcctgccgccgtggccatggtctggaaatggatcttcaactcccagtacggcatcatcaacagcgtgctgggcaccaacatcggctggctgaccgactccaagctggtcctcatcacctgcgcggtggtccaggtctggtccaacatcggctatgacgccgtgctgctgctggccggtctgcagaacgtttccgccaccctgtacgaggccgccaacctggacggcgcgtccaaggtcaagcagttcttccacatcaccctgcccatggtctcccccaccttgttcgtggtcatgatcatgcgtctgatgtcctctctgaaggtattcgacctgatctacatgatggtggacgacgccaaccccgccctcaacgacgcacagagcctgatgtccctgttctaccgccagagcttcatcgccggtgacaagggctacgcttccgccatcgttgtctggacggtcctgctcatcggcatcgtgaccatcttccagttcatcggacagaaaaagtgggtcaattacgaggtgtaaagtatgaatacaagcatgaaaagcaacaagcagctttccaccgcgctgacatatgtggtcctgatcctgggcagcatcatcatgatcttcccctttgtctggatgatcctgaccgccttcaagacccaggccgaggccatggccattccgccgcagatcctgccttccagctggaacttcgacaactttgtcaccgcactggaaagtctccccttcgtcaacctgtacgtcaacaccggtctgctcatcctgttccgcgtgctgtgcgccgttatcttcagctccatggcaggctacgccttcgccaagctgcagttcccctgcaagaacctgctgttcggcatcgttctggtccagatgatgctgcccagccagatcttcatcaccccccagtacctgatgctcgcccatctgggcctgaccaacaccatctttgccctggtgttcccgggtcttgtctccgctttcggcaccttcttcctgcgtcagacctacctgggcatccccaatgagatcgccgaggccgcctatctggacggctgcaacaagtggcagaccttcaccaaggtcatgttccccctgaccggttccagcatggccgctctgggcatcttcaccgcggtgttcgcttactccgacctgatgtggcccctgatctgcaacaccgacctgaacatgatgaccctgtccgccggcctgtccaccctgaacggccagtataccaccaacttccccgtgctgatggccggcagccttctggccatgatccccatggtcctgctgtacctcgccttccagaagaacttcatcgaaggcatcgccatgaccggcggcaagtgatcccgatcttccccgccaacatctccgcaaaaggtaaaccgtaaacttttttcagcggacggcacccggccctgccggccgggtgccatttttttggtatctgtggtatagtaagaccgagacttcgataagtaaggaggatgccctccatgagtatccagatgaaccctgcaaaaacgcttttcaccctgcacaccgcccataccagctatcagatgtgggcggacgagcggggtatcctgcatcacctttattacggccccgccatcggcgacgacgacctgcgccccacggaattttactccgactgcggcttttcccccaatcctgcgggggtggacgtgcgggactactcccttgacaccatcagccaggaatacaccggctgcggcgtgggagatttccgcatttcctgcctgagcctggccaaccccgacggcagccgcattgccgacctccgctttgcgggggccagagtgatgcccggcaaatatgccctgcccggcctgcctgccgctttcgacaacggcggcgagtgccagacgttggaaatcaccctgaaagacgccgtcaccggcctgaccgtgacgctgctttacggcgtgtacgaggaagccgacgtcattacccgggccgcccgcatcgaaaacggcggcaccgcccccatggagctgaacaaggcggcctccgcctgcctggacctgccctttggggaatgggagctgatccacttccacggccgtcactgcatggagcgccagcccgagcgcgccgcccttccctttgcggtgcagacgctgcgctccgcccggggcgccagcagccaccaccacaacccctttgccatcctggccgccccccataccatcgaggacgccggcgactgcctgggggccatgctggtctattcgggcaacttcaagattgaatgtgagcgcagccagctgcacagcacccgtctggtcgcgggcatcagcgacgacgacttctgctgggcgctggaaccgggtgagagctttaccacgccggaagtgctgttcgcctactccgaccgtggcctgggcgagctttcccgcctgtatcaccgctttttgcagcgctgcgtcatccgcagcagctggaaggagcgtccccgtcccatcctcatcaacaactgggaagccacctatatgaagttcgacggcgagcgcatctacgccatcgccaaacaggcccgggagctgggcgtggagatgatggtgctggacgacggctggttcggcgagcgtgtggacgacagcagcggtctgggcgactggtgggtcaacgaggaaaagctgggctgcaccctgcccgacctcattgcccgcatccgtgccctgggcatgcgcttcggcatctggatcgagccggagatggtctgccgcggcaccaagctctacgaggaacaccccgagtgggtactgtcggcccccgaccgcacccccgccaccggccgcagccagctggtgctggacatgggccgcaaggacgtggtggactacctgtacggcatcttctccgcccttttgcgggacaatgacatctcctacatcaagtgggacatgaaccgcaacatcaccgacctgttcagccgtgtgctgcccgctgcccgccagggcgaggccgctcaccgctatatgctgggcctgtacgacctgctggaccgcctgacccgggaattccccgacgttctgttcgagggctgcagcggcggcggcggacgctttgacgccggcatgctgcaatacttcccccagatctggtgcagcgacgacaccgaccccatccaccgtctcaagatccagtacggtacctccttcgggtacccgccctgcaccatgggcagccatgtgtcggcgtcccccaaccatcagagcggccgccacacccccctgtccacccgcgccgtggtggccatggccggcgtctttgggtatgagctggacctgggccttttgtccgacgaggagaaagcccagatccgcacccagatccagacctgccgcgacctgcagcccctgctcattgacggccgctacgaccgcctgaccgacgccatgaccgacagttacttcaccgcatggcagttcaccgccccggaccagagccgcgcggcggtcagccttgtggtggtggaccccaaacccaacccctggcccatccacatcaccctcaagggcctggaccccgacgcccattaccgggactcccgcacgggcaaggtgtacaccggcgcggccctgtgccatgccggcctgacgctgcccatcctgctgggagactacacggcagtccagatcctgctggaaaggattgatacctaaatgaccaaacaggaggaatcccgttttcaggcccgcctggcccgccaccatgacgagctgcgctggctgtacatggaactgtacgacaacggctccatgtttgccgaactgtgcgaccagatgcaccgctttgccgaccagcggaaagccgcgctgaaaaagcgcgaccttgcccgggaggcggagccggactggtacaagcaccgcgacctgctggggtcgatgctctacatcgacaactttgcggggaacctgaacggtgtgcgcaaaaagctggattatctgcaaaatgccggggtggactgcatccatctgatgcccttcctggacacggtcccggaacgcagcgacggcggctatgcggtggcggatttccgcactgtgcgccccgacctgggcaccatggacgacctgcagaagctgaccgatgcctgccataaaaaggacatcaacgtctgcatggactttgtcatgaaccacaccagctgcgaccacgagtgggcccgccgcgcccgtgccggggaaggcgagtacatgagccggtacttcttctacgacaacccggacatccccgcccagtatgagcggacggtaccccaggtgttccccaccacggccccgggcaactttacctacctggaggactgcggctactgggtcatgaccaccttctacccctaccagtgggacctgaactaccgcaacccccgcgttttcaacgagatgatgtacaacttcctcttcctggccaaccagggcatggacatcatccgcatcgacgcggtgccttacatctggaaagagctgggtaccagctgccgcaacctggacaaggtgcacaccatcgtgcgcatgatgcgcatgatcggcgagattgtctgccccagcgtcatcctgctgggcgaggtggtcatggaaccggtgaaagtcgtgccgtacttcggcacagtggacaaaccggaatgccaccttttgtacaacgtgaccaccatgtgcaccacctggcacaccgtggccacccgggacacccgcctgctgcgccagcagctggacgccgtcagcagcctgcccaagcagtatgtgttcctcaactacctgcgctgccatgatgacatcggctggggcctggattatgacaccctgtcccgctggggcatggagcaggtcccccacaagaaatacctcaacgagtttttcctgggccatactccgggcagcgtgagccggggcgagctgtacaacgacgaccccaccaccggcgacgcccggttctgcggcaccaccgccagtatgtgcggcctggaagccgcccggaccgacgaggagaccgacctggccgtgcgcaaggacctgatgctccacgccatgatgctgttccagtcgggcattcccatgctgtacagcggcgacgagatcggccagctcaacgactacacctacaaaaacgacccggcccgtgccggggacagccgctatgtccaccggggcagactgccctgggaccgcgccgaccagcgcaatgaccgcagcacccccgcggggcagatctttaccggcctgcgcgccctggagacgctgcggcgggagcatcccgcctttgaggccagcgccgacgtctggacgctggacaccggcgacctgtccgtactgggcatcggccgccatggggagggcgagaccctgaccggcctgttcaactttgacccggccgccaagacggtgcccctgcccgacggcagctggaaagacatgcagtccggcgccgaatacaccggcagcgtgcccatgaaaccctgcggctatctgtggctgcagcaggtctgaccggccgcccctgatcctttgccttctgccttgcccggcttcccgaatcggccgggcaaatctccaacccccgataaggccgcaggcgcctttccgtcaaaagcggaaaggcgcctgcggtcgttttatagggtttctctttgcaaagcaagcacgccgccctgcgccgcctgccttccctccccgccacgaagccttttgcatggcagccgtccccacacgcacaaagcccccggccgtcaccctttcagggtgcagccgggggcatttttgcaggaaaaggtcagacgaggtcagggcagggtcgcatagcggccggcgttgaagtcctcgtcagacaggaaggccatgcggttgaccatccacataccgttctgccacaccagctcgacggtgcggtggttggagatctccttctgcaggccggtctcccggttggtggcgtaggtcacaaaggacgcgttgtagcgcaccataccgctggcatactcgatggtgggggcggagcagaccgcctggtaattttccagatcatactcgttcttggcgttgtcctcgctgaacacgtgatcctcctgcagggagttgttgttctgggtggagtaaaccatatacgccatggtctggttgttgatgcagttcaggtagccggtgtagtacgcccaggtcagcacgtccaccactttgtagctgggctcgcacaggccggtctcgtcacagtcggtgtaggcgccgtactgatcggggtcacccatggtcaggtcgttgccgtagcggtagttgtaccacaccgccgcggtctggtagccgtcctccgtgggaacgatggcccgcacgatgcagacatccggcagggaatcccggctgaccaccacatcctcacccactgcggtgaagctgaccgggttgccgtccaccgtcagggtggcgttttccggcacgttgcgcaggaccacctggctgtcgctggcctcggcgacctggccctggctgggatcggcgggttccacgccgtcggtccaggggtcgccggtggaggcggaaccatcccccgccgcggcctgggactggctttgggaggtcgtggtggtttcctgggagttcttgggcatattgcccaccacccggatcagggtgccgataagggcgcagaccaccaggaccaccacaagaatcaggatctttttgttctggtcggacagacctgccaggggattgggcatcccgccggaaggcgccgcaccgccggggccggcaggctggccggactggaccggctgaccggcctgaggctgggtcgccggtcccaaaggtgcgccgcagttggaacagaacttctgattgtcgtcagcggcgggctgtccgcattttgtacagtatctcatagggaaaaacctccgtagaaatggttcacacaggaatgaccgacacagagccgtccgagctcacggcgcggcagcagtccacgtatacctcaataaaggaatacccgccgcggatggcaacaccccgggctttctccatgccgttgggcaggggatgccccattttgtaatgctcgatgatctggttgttggggtcaagggtatggacctcgtagggggcgcccagatagcacttggacacatagcccagcaggatgccctgcagctccacttccgggaactcgtcccggatggcgtccaggatgcgctccacctggtagcggttcatcacatgaccgcccgcgtccagcgccgccagggcgtccatgtagcgcttgctgcgtttctggcgcagaaggcggtcgatcttcattttctgctcctgggtggtctgctgcttttgttcgctgtgcatggtggcactcaggatactgttggtctgtgtctgtgtggcctgcggtttcaacatcggcctgggcatttcgatctcccctttgctgcttgccccttggcgcgatccggacagagcgggccgtacccggggcgttttcttttattttatcagattttccagagattttctgtagttttgctgcgattgcgccactttttggcggacttcctcaaacagcggctgcaattccggcggcatgttggaccgcgccaccaggccgtccttggggctcatgcgcacatagggctgcagctgtgccggaatttggatctgcatatccggtccctcctttttatttatcgctcatagtcccgctcggtatcccgggtacgggcgccaccgtcgccgtgcatgacgtcgctgtccgcggaaccggtgttcccggccgtctggcgttccttccaccggcgcacggcctcggcctgctgctggggcgtgggagcgtcccggcgcagacggcggataaagtcgttttccggcccggctgccgcctgtttgtccgccggggcggtctgctccgcggcggtttgggcggcggcctgctccttacgctgccgggcctgttccatcaggcgctgcttatagctttgcagcccggcatagatgcgggatgccagcgggcggggatgttcactggtctgggcttcggcggcggcttcggccagggcttcaccgtaatcggaaccgccgtagacagacaggttatcggcaaaggcctcgctgtcaaacacgatgccgtagtttttgcaggcggtctccacaatggtgtcggcgtggcggttgtcgatgtactcccgcaccatgcggttgtaggcttcccggtcggggacctggccgtgctccacgccgttgttcagggcgcagagttccaggtgcaccgcgtggcccatctcatgggtgaccaccgagcggatgctgctttcgggcaccatccatcccgtctttccgttctcttccagccgcttgggcaggttggcgtcggaaaagtgggtgctgttcaggttgagcaccccgccaaagggctggtcgccctcgctggggccgtagctggcgtaggtgtcggggttgggcatctcccagcagcggatctcccgcacctggcccacgatctcggggttttgttccagcatggatttgaccgcttcgatcacctggggacggtattcctcccggcattcgtccaggtctattttttccacgcccagacgccgcaattcggcatattcgccgccttccgcggcttctttgggcggggcagactcggcatttttggtctcttccctgccggcgcggccccgcagcttctccgccaggctgctgaacaagccctgcttggtctgctgctgcaattcttccagctggcggttgtcctcctcggctttggcccgcaggtaggatagctcgctctttttctgcatccattcctgctgttccttcaccatctggagatattgggggtcgtgttcgctctcccagcggcccaggttgttgcgggcgacatactccgccagttgggcctggcgggcagcgatcatggcgtccagcccctgctccgcgtcggaaaggcggcggatcaggtcggtattgctgtcggcaatgcgggccatctcctccttgctgggacgctcggcatagatctgggcttcggcccggtcctgctgctccgatgcccggatggaaagctggttgatctcgtccagacgccgctgtttgccgtcaaaggcctgctgatacagggagcggcgggtggcttccacctcttccagctgttccttgccctgggccagtttttcctccagctgctgctggcggtcccgggcttcgttgtaggctttcagggcatccttgtattcgggactgccgaaaggcggcatgttggcaaagctgtcggcagcctgcctgcgggcttcctccagctgctgactggtctgctccacctgttcctcgcaggcgtgctgctcgatggacagccgccggaaggtatccgaatccggcagcagctccccgtccttttcggcgtttttctcaatgtcgatgcgctcttcctcggcctgctcgggggcaaggggcagttcccccttttcccgggcttcccggacggcttcggggtcgtcgggctgttccggcgcatcttcggggtcttgttcggtatccttttcggagttttcttcggggtcctcttcaggattttcttcggcttggcggtccgggtctttttccggggaatcttccgttttctccggcgtttccccggggttttcttcctgttcttccccgtcctccgggttttccccggcgtctttttccgggtcctcctcgggggattcttcggtattttcggcgtctttttccggggaatcttcctccccgtcctcgggggactgctcaccgtcgccctcgggattttcctccgggtcttcggcgggctcttcgccctcgtggggattctcggcgctttcttcggtctcttccccgtcctcgggggactgttcgccgtcgccctcgggattttcctccgggtcttcggcgggctcttcgccctcgtggggattctcctcggtttcttcggtctcctccccgtcctcgggggactgttcgccgtcgccctcggggttttcctccgggtcttcggcgggctcttcaccctcgtggggattctcgtcggtttcttcggtctcttccccgtcctcgggggactgttcgccgccgccctcgggattttcctccgggttttcggcgggctcttcgccctcatggggattttcagcgtcctgttcggtgctttcctcggtattttcagcgttttcctcggaatccttctccgtgtcctcctgggactcgccggtgtcctccgccttctgttcggcggtctcgccctcgggctgttcggcgtcctccgtctgttcgggggcgtcctccgttttctccccttcttccgggttctctccggtggattccgggtcctgctcggggtcggtctcggcatcctgttcggcggtctcctcaggattttcggtggtttcctctccggtttcttcggtattttcggcgttttcttcggtggtctcttcgctatcctcgggggattcttcggtgttttcgggaacctcttccggctgttcggcgttctcttccgcctgctcggcggcttgctctgcctgttcttcggcttcggcagcctcccgggcttcggcggcctcttcctccgcctgttccagttcctcggcggcttcgtccgcttcctcgtgggcctcgatgaactcctgcttctccgcctcggtgccgtggagttccacctccgggtcggggcgctcgatgacctcggcgctctccacctccacgccgccccgggcttccaggttgtccgtcagctcctgcatgtcctcggggtcctcgcaggcctggtaggctgcatccccctccgcctggctgatggcgccctgctccgggtcggtgacgcggtactccacacgggcgacatagttgccgccgcattcctcgtactcgtcctcgtcaaagtcctcggggttttcggcgcccaccttgtcgccggtctcctgttcccgctcggcgcactcgtcaaagttttcccgcgcttcctccagcttttgctgttcgggctgttcggcggctttctgttccgccttgcagtcctcaaaggattccgccttttcctcccccgacgtttccagaggcttggtctccacagggggacgggtctcctccggggaacggcggttttgttcggggcttccaaaggggctgcgggccatctgtctatccctctttcgtcacaaaaattacggggcggttcagaccaggaccttgcgggtgcggggtttgtcgctcttctgctgcagttcctcgccgccgatgggcttgccggaagcaggcactgcccgctccttgccccagtcgcggatggcctcgatcttttcggggctggtctgggacagaggcaccacattgttgaaggcgtcgatgatgttggcttcggtcatctggaaatcgtcgttggcgatctcacggtaggccaggtcgcggacggtggattccaggtcggcgccggtaaagccctcggtgatggcgacgatcttgtccgccagagggccggcaaaatccagtttcaggtatttgcgcatgtacaggctgagaatgtcccggcgttcctcggcggtgggcaggtccacaaagaacagctcgtcaaaacggccgcggcgcaacagttccgacggcagcatggagacgtcgttggcggtggccaccacaaagaccatctttttgcactcctgcatccagaacaggaactgacccaccatgcgggtggagacgccgccgtccccggcgcccttggtggcgccggacaggcccttttcgatctcgtcgatccacaggatgcagggggagacgttttcggcggtagccagagcgtccttgagctgctgctccgactggcctacgtagctgccctggacggtggcgaagtccagccggtagaggggcagcttccacgccgccgagatggacttggcggacagggatttgccgcagccgggcacacccaccagcaggatgccgcggggcgggcgcaggcctttgctgcgcagttcgtcccgcttttcgggggtgagcagctctttcttttcattgagccacttgcgcaggccttccagaccgcccacgtccaccacgctgtcgtccacgtcgatcttttccaggccggaaatatccgagaacaggcggtccttggcgttgcggacctcgtccatgtcggacttgcagatgcgcttgttggcgatgagggcggcaatcacgttttccgcctcgatacgggtaacgcccgccagcatggaggcggcctcccggatgtcggtgttgtcccactcgatggggatctcgttgcggtagtcgtcgatgtactccttgatgatggtgtacatctcatcctcgttggggttgtcgatcttgagggtcatacccaggcgctgcagctggttccagacggggttgttggtcagcacgatgaccacaccgccggactcgttggccagggtgaccaggtccaggatctgccgggcatcgccgttgtcgctgctgatgtcggggatctcggtgaggatgagggtcagatactgcttgcgcttcatctgctcgctcatgaagtcgatggcgccgtagaccgacttgtcctcattgaggaccttctcggtggacaggtcatagacacccttggacagggtgtggacgtagaacggcaggttcagttcctcggcgacctccttcagcacgctgagggagcgggcgcgctcgatggtattgatggcgataaaagggatgcgggcaatggaatagcgccgcagcaggtttttgctttcggccagtgtactcaaaactgtatgtcctccttacagggtattgacgcggtggttgcggacgatgctggccagcttgccggtacggtcccgcttggcgctgtcctccagggatttctgcatgctgtccgcctgggcctgcaccagctggcagtactgggcgcggtccttttcggggatgacgggcaggtccatggcatccttgaggaaactcatctccttgcgcagggtcagaagcgcccgcacgatgtcgccctccccgttgccggggcggcccatatcccggctgaaccggtccgatgcccggttcatgcgggtgttgacggcgtcggtgagctttttggcaaacctctcggccacgccgctctgccaggccagggtgcctcttttcatcgcctggagcacatcggcgtcgttggtgccgtttttcagggcatccagcagggtgctccactcggcataggtacggggtgccgtcatacgctcctccgtttccgcacggccagctgcggcgggaccaggtcccaggccggcaggccctgtgcaaaggcgttttcttcttcctccgcctgcacggcagcggctgcgggggcggcgggctgttctttcaccgccgcaaaggccgatgccggggccgcctgcggggcggccggagcgggttcagacgccgcaaagggagcggctgccggggcaggttctgccgcggcgaaaggggaagccggggcggggtccgccgcggcaaaaggcgaggtctccggtgtggacagaggacgggtctcctcctccgttttcattgaaaatccggcggcctccggtttgggctcggcgggctggccgggctgagccccgatggaattgataaagctggctctctgttttgcatccatgattgctgccctcctctatggtcaggatacgtggatcttgcgggtgctgtccgccagatgcttgacgtactgctccggggtgatctgttccataaagtccttgaccttctgtgcgtcggcatccttttcgccgaactcggcacggaagtccacgacctccgccagggtggcccgcaagatttccaggccgctggtgcgtttctgttcaaactgagcctcgatgttggcgcggctggtctcgatgcgcttggccttgctcatgtaattgaggaccatggccacgccggcgatgatggccagcacaccgaacagcgccaggcccgcaaacagcatgatgacgccgatggctgtgacgccgtagcctgcatactggatgtacttgtcataggcggacagcacgcaggcggccagggcggtggctttctcggtgtcgataagctggttgaagcgggtgcacagctcttcctcgttctcaccgtcgcaggtcttgtcgtcaaaggaatcgatgttgatctcgatctcgttggggatcttcatgcggtttttggccaccacgtcgtcaaaggcgttggtgatccagtccttggacagggcaatggccagcttctgggtggaggggctggcgtgggagctttccggcttcatggcggcgtcggtcaacagctgggtgaagtccttcttttcatcaaaggcggtcttttccacctgcatgctctgtttggcccgggcctcgtcgccgcggtaatccaccacgaactgctcgaacttctcctgcatgcgcagggggacttcctcctcgtcaaagtcggtgaccagactgttcatgatgtcgtccagctggttcttgaccgtgtcgggggaatcgggcttattgaagatgtccatgaagtattccaggatggtggcgtacagttccgcaccttccataatgtccttgagcaccggccaggtatggctgtacttgggcaggtaggtgtagcggctctcatccatgggtttgcgcttgaggttgatggcgtcgccccactgctgggtctgctgttccacaaagcccactttctcggacaggtggtccagccattcgcccatctggcgggagatgagaccctccgagtcggcgcccagcaggccgcaggcgaaggcgtccagtacgatgaccgccttgcggtccaggttttcggcgtcctgcccggccagataccgctgggtccacttgaggcaggcctgtttgcggccggcacggcggcagatgagggcaaacagcagggaggtcttttgatcgtcccggcggatgccctcggccagggcgcgctcggccagttcgggcttgtcgttgatccaggcggacagggccaccaggcagggggccagccagtaccgcggggtggagaccatcagttcctcggtggcgttggtgatggtctccttgcggacgatgcccaggtcgttggcctgcagaatgccggtggtggtgcggcggatgaccgcatagtggccgtacttggtctccagttcctgacggatcttgaccaggcggacttcggcggtctgcaggcggttggtcatctcctgccgctggacgtagatcttgaagtcccgggccagctggcccagctcgtcgtagaccacccggacgttctggttcaccgaacccacgttctggttgacggtgcccacatcatcgtggatgacttccaggctgcgcccgatctcaccgaggttgcgctcgatataattcaggttggccgcgctgattgcataatctgccataatgttcctccttgtatctgcttattcccatcaaagcgatcgtttttgtgtctgccgcaggtaatccgccagcacctgctgacgggcgccgtcgtccatgtcgggggcctgctgcaaaatggccccgaacacgcacatccggcggaacagcccttcggtgttgaggggcttcatgtaggacgcccgcaaaaatgcgtccatggtgccagcggcaaagtttttctgtttccacttttccaccaccatggcgccgttgaccttttgttccgcaaggtgagcgccgatctcccgccagtagcggcagcggtgttcacagtaggtacagcccacatgattgtggatggtatggtcgtagttttccgcgatggcctgcacttttttgcggacctcgttgagcacctgggggcggtccttgtcatagaaggactccaccagggggaacttgacgcagcggggacggttgtccccctcggaatagaccgccgcatagccccggcgcagggaacttaagtattcgatctgctcaggggtcatgttcatggcccggccgatggtctcccgatcgtcctcggccacggtgcggtgtacgatcttgaggttggtgttcttgatggtgtcgggggccagcttggtggggatctggtcggcaatgaggatgccctgaccgtaggtacggatctccgccagcaggttgcagaaaaattccaccgacttggcccgggtgccgccgccctcccccgattcctccacctttttcagcaggcggtgggcttcctcgatcatgaggatgtgggacagatccttgctgcccttgtccatgagggatttgcggtactcgtacagctggaccatgaggatgccgatgacaaaggacttggtctcgtcgtcgccgatgtcctccagctccagcaccaccgggcggttgagcagttccccgatgggcaccgaccggggagtgtccagcatggcgcccttgccgccgatcatcaaagaatggatgcgggcctgcagggcggtcttgacgttggactgcacttcctggtaatagcccatgcggtccaccaccaccgccaccttattataaaggtcggtgagggtggggtactcggtcaggccgtagcggtttttgttttccacaatgtcccagccgcggtcgtcgtagatttcatagacggcgctttccagcacgtagggcaggggcgggaacagatcaaaggctgccttgaaggtggacagcagatagtcgatgtgggtctgcagggaaatgcccggcgtcgtctcaaaggggttgatgcggtaggggatggaactgccgctggcttcagcgcccagggtaaagaccagaaggtcctcaaagcctttcaggttgcgcagttcccagtattcccgcttggccgactcgatgaccaggaaggggaccttttccccgggcggggccttgccccacagggtgtccaggatggatttggtggtgttggtcttgccgccgccggtgatgccgatgatgagggcatgtcgggtcaggtcccgcttttccacgttgtagcggttgtcggcggctgcgccgccgccccgcccggcgcggcagacttcccccagagggaccggcttgcggacatcccgtccccggtcggagacgtcgaactccacatactggtccacatagtagccggggaattcccgggcgggaagctggcacaaggtgcccagctggtcgctgctgagcagggtctggtattcgtagacatagagggagacgtcggtccccagctcggggctgtgccaccggctcagggggtgagcgtcgtcctgtaccaggtcggcgatcatgtaggcgttggggatgacctccccgatgggattatagtccaggatgcgcaggggttcgggacggacgccccggccggagtaggccgaccgcaccaggttgcccagctggcgggcatcggcgggggtgtcggcggcgaaatagccgttgacccgccacatgccccgggccatgccgtccttgagctgctcttccagcgcttccagattttcaaagtagtttttgctggcaaagtcctgatgctgggccgagatgttgccctgagccccgccggaaatggagcggttgatgagttcaaacacccgggccatctcctccagcaaacggctgtgaccgaaggtcacagcaatgttgctcaggcccgaagccagcacgatgtaggagaaccggcgtcccagcatgccccggcagatgctctcgatctgttcgggaggcggggcgttttcctcctcccgctgggaggggatgccggtgaacatgccgccgtagcggcgggggcagctgcgcaggggattctccgacacgggggccgccgcaatgccggggcagcggccttccagggaggccagcaggctgtcggtcagggtgcgcagcgtccccagatagagggagacgccccgctcgtccccgatgagggcatagcagaagggcacgccgtagcgcacacagccgctgagcacgtcgcccatgagggacgccatgttcacgggggatttttcatcccagaaacggccgatgccctccaccttgaggaaggacatgttgttgcactcttcatacccttgcgcccggaagttgccgctgccgatgaggtccagttcctcccggcagacggcggcgttgcgctgctgttcggtatacatctttacttccccctctccccgggtcctgtgccggggctgcttttaccggaacaacgcccggaagaaagccccgatggccccgaagatgccgcacaggatggaaagcaccagtttgctcaccagcggcaggttggtcaggcagatggcgacgaccaggatcagaacaagacccggcacgccgatgtaggcaaacagagtggccagcaaaaccagcacagccagcaccgccaggcgcaccaccatggcggagacgttgtgctggggcacgatgatcatgccgctggcggtgttttcgatcttgtcggcaatgatctggcggctgctgtcccggtgaccgtagacgcggacgtggttgttctcgctgaccacgccagcattgaccttgccgtagacgatgacctggtcacaggcagtgcccgacgccgtgaccgaggtccccgagtagtcggggaagacctggaaggtcagcacgtcgggatcggaagtataggggatgccccggaacacggcatcaaagatcttggccacaaaaccgcgctgttcggtgctggtggcaacgtttttggtgatgcccacgcacaaagcgccgttggtgttctgggcaggggcagcctggggcgcggcggagggcgtctgcaccgaggcaggggcgctctgctgcacggcggcctgacccggacggtagaccggtacgtcaggggtgggcaccgtcatgtcctgggccgggcgggcggcaggagtgctgctttccccggagaccaggatcttgcggcggggcgtgcggccggcggagacagattccggctccggctggggctggctcaccacagggcctgccgcacggccgcggccgcgggcgcgggccgcctgggcatagggatcactggcggcggcgcagtattcgcagacatcgccgtcgtgctccacatcataaattccgcaaactgaacatttatacgacatttttgatcgcccctcgtacagatcaggcacacctccggccgggctgtcagcctcccggcagaacgcgcgccttcccgtctgtcacaaaaatttgaaacaaattattcatatattattcattatacctacacgtttctatggcgtcaaccaaaattcgctcctatttttcacaattcgccccgatgcccgcggcggcgtttcccggcccgccgggcgtgccccgcaaaaccttgtgaaccgccgcaaaatccgttataatcggtaacaggtatgcaaatttatgctttgactatggcagggagatgttccaatgaatataacgttgcaggacctgaccaagcggttccccgcccggggccgcaaggcaaagggagagaccaccgccgtggattcgctgagctttaccatccccgacgggatgctggtgggtctgctggggccgtcgggctgcggcaagtccaccaccctcaacatgatctgcgggctggagacccccacctccggccatatcttcttcggggaggaggacgtgactgccctgccgcccgagctgcgcggggtgggcatggtgttccagaactatgccctctatccccatctcaccgtcatgcagaacatcctgttccccctggaaaacctgaaaggcgccgcccggccctcccgccaggagatgcgggaccgcgccctggacgccgcccgtctggtccagatcgaggaacttcttgaccggcggcccaaggagctgtccggcggccagcagcagcgtgtggccattgcccgtgcgctggtcaaaatgccccgggtgcttttgctggacgaacccctctccaacctggacgcccggctgcggctgcagacccgggaggagatctgcaagatccagaaaaagaccggcatcaccaccctgttcgtcacccacgaccaggaggaagccatgagcatctccgaccgcatcgtggtcatgaaggagggcgtcctcatgcaggagggcgcgccccagcaggtctacgacgaccccgccaacctgttcgtggcaaagttcctcggcaccccgccaatcaacgtctttgagggggaggtcaagggcggcatgctgcttctggcaggccagaaagccctggccgtccccggcgcccccgacggcaaggtctgggcaggcgtgcggccggagggttttgtccccgccgccgacggcccggtggtctgcgatttgagccgggtggaggtgcttggccgtgacgtgagcatcgtctgcggccatcccgcctgccaggcaggcactttgcgggccatcctgcgctccgagcacgaggtggaccccgccgcggccgtcgtccgctttgccctgcgcccggacaagaccttcctctttgaccgggagaccgaggtccgcatcccctttgacgccgcccccgtggcgggggtctgaccgggcaaaggaggcctgacacatggaccgcaattccaaaaaagcatggctttacctgctgccgtcgctgatcctgctgggggcgtttctggtctaccccctcatcgacgtattcatctattcctttgaggagtgctacaacttcgcctcccagacctaccagggcgtgggcctgtacaactacctctacgttctccacgacccctactttttgcaggcggtggaaaacacctttgtgctggtcatcatcacggtgcccgtgtccactgggctggcgctgctcatctccacggggttaagttccatcaagcccctgcgcaatctcttccagaccgtctactttctgccctacgtcaccaacaccctggccgtgggcctggtgttcatggtgctgttccagaaaaccgagtacaccgacggtctcatcaacctggtcatccagctcttcggcggggagagcatcgacttcatcaacggtccccactgggccaagatgttcgtcctctgcttctacaccgtctgggtggtcatgcccttcaaaattctggtgctcaccagcgccctggcatcggtcaaccccgactactacaaggccgcccgggtggacggtacctcccgccggcgcatcttcttccgcatcaccctgcccatgatctcccccatgctggtgtatctggtcatcaccggctttatcggcgcgttcaaggcgtacagcgacgcggtggcccttttcggcaccgacctgaacgccgcgggcatgaacaccatcgtgggttatgtctacgacatgctttacggggacagcggcgggtatccgtcctatgcgtcggcagcggccatcatcctgttcgtcatcgtgctgaccatcacctgcatcaacctgcttgtcacccgcaagcagatccgggaataagggggcgcataccatgacatcccataacgactacgaaaaactgcgccgggccgcgcagcgcaaaagcggcctgatccgggcgctgacctatctggggctgagcgtctgggcggtggtggtgctgttccccttctactggatggtgctcacctccctgaaaagctacggcgcctacaacgcggaacacacgccggtgtttttcaccctgtcccccaccctggaaaactacgagaacgcctttaccgccgtgcctttggggggctatctgctcaacaccctgatctttgcggtagtcaccaccgccatcatggtggtggtgagcactctggcggcttacgcctttgcccggctgaaattccggggcaagaacctgctcttcgggctgttcctctccatgatgatgatccccagcgagctggtggtcatcaccaactttgtcaccatcaccaactgggacctgcgcaacagcttccccggcctgattttgccctccatcacctcggtgttctacatctaccttttgaaggagagctttgagcaggtccccgacgagctgtaccgcgccgccaaggtggacggaacctccgacctgaaatatctgtggaaggtcatgatccccatctgccgtcccaccatcgtcaccatcaccatcttaaagctcatcgagtgctggaactcctacgtctggccccggctcatcaccgacgaccaggcctactacctggtatccaacggcatccaggagatccgggagaacggcttcggccgtgagaacgtccccgccatgatggccgccgtggtggtcatctcggtgccgctgatcctgctgtttttggccttccgcaacaagatcatggagggcgtgtccagaggagggatgaagggatgaaaaccaagcgcatccttgccgccggggccgccctggccctggggctgacccttttcaccggctgtcacggcagccgggagcaggccgcctttaccgtgccggaggagtttgacacctcccgcaattacgagatcactttctgggccaaaaacgacaccaacaagcgacagaccgacatttacaagcaggccattgaggagttccaggagatttaccccaacatcacggtgactttgcggctgtacaccaactacggcgacatctacaacgacgtcataaccaacatttccaccggcaccacccccaacgtctgcatcacctaccccgaccacatcgccacctacatgaccggcgacaacgtggtggtgcctctggacgacctgatggtggatgaaaagtacggtctgggcggcagcgaagtggcctttgacgcccccaccaaggacgagatcgtcccccagttcctggaggagtgccgtctgggcgggcacacctacgccctgccctacatgcgttccaccgaggcctgctacattaataaaacctatgtggaggccctgggctacaccctgcccgacaccctgacctgggatttcatctgggaagtgtcggaggcggccgccgccaccaagggtgccgacggggtctattccgtcaacggtcagcaggtgctcatccccttcatctacaagtccaccgataacatgatgatccagatgctccgccagaaaggcgcgggctattccaccgagacgggggacattcagctcttcaacgacaccaccaaggagcttttgctggatatcgccgatcacacggcggcgggggcgttttccaccttcaaaatttccggctacccggccaacttcctgaacgccgggcagtgcatttttgccatcgactccacagcaggcgccacctggatgggcagcgacgcccctctggtggacattgcggaggaggatgtggtggactttgagacggcggtctatccggtgcctcagttcgaccccgaaaacccgcagatgatctcccagggaccgtcggtctgcatctttaataaggatgacccccaggaggtgctggcctcctggctgttcacccagtatctgctcaccgacgaggtgcagatcgcctactcccagaccgaggggtacgtccccgtcacaaccaaggcccagtctacccccgagtatcaggactacctgagccgggagggagaggacaacgaaacttactactccgtcaagatccaggccaccaagctgctgctggaccatctggaggacaccttcatcacgccggtgttcaacggctccgcctccctgcgggacgcggcaggccagctcatcgagagcgtggtcaagtcggtgcggcgcaaccagacggtggacagcgcctccatcgaccagctttacaccgacaccgccgcgttgtatcacctggattccgtctcctccaccgggggcaaggcggatctcggtcccctgcccggcaccgccgtggcgctgctggccgggctgggcatcgcctgggcgggcatcctgctctacctggcaagcctgtggctgcgcaagcgccgggccgcccaaaaggggaaataaagtccccggggccgcggggctgccgggtaattcccggccggagggcacggccccccgcgtaccccggcatacaaagcaaaaaagactgctcacgtcaaaggcgtgggcagtcttttttgcgtttttctcgccgcacccatccgcacacccgcccggccaaaatccggcgagattccctgtgatcctttcgccccgccgcaaattttacagcttgcggcaggttttttctgttgtatttgggtattgtatgctgtaatatgaaaccaacatttttcgtcccggcgaccgcgtgtcaaaaagccccttccctgttctgcgcggttccataagaaaacaaagccgcaaaattctaactgcaaggcggcatctgccgcgttatcgggctttgcgttccatacaggagcgcttcagccctctgccttgcatctgccgccatgcagcgattttgcgatgctttgcagtttttataaaacctttgttttcttatgtcactcgcgctttattttgggcctttgcgccgggtatcctgtctatgaggaggagtccccatgaaaacctgtcccgtatgcggcgcgtccaaccctgacaacgctgccttctgcaatgcctgcggcggacggctgaatgccgcccccgatcccggcacggaggccaaccgcgaaccctacgacagctacggccccgcctatgacaacggcccggcctacggcgggcatccctacggcggccagtcctacggcccgcccatcctgccccgcagcattctgctggccatcatcctgaccatcattacctgcggcatttacagcctgtactggatgtgcaagatcaacgacgaggtcaacgccctgtccggggagtacaatgccacctccggcggcgcggtggttctgttttccatcatcacttgcggcatctacggcgtttactgggcctacaaaatgggccagcgctgcgccggtctgggcggcgaagcctccggcggcatcctgtacctgatcctggccctgttcggcttccagatcatcaacctggccctgttccaggatgtcatcaaccgatgcgtctgacccctgggggcaagaccctgctgcgggcggggcttgtggccctggccggggcgggatactatctgtttgccgcggccttcggggggctcccctgcccgtttcgcctggtgacggggttcaaatgccccggctgcggcatcaccaccatgatcctgcgccttggccggggagacctggccggggcgttttgggcaaaccccgtcctattcgccaccctgcccctcctgatcgggctgatcttgcgccagggctggctgcgggccaagggacggcgcttcggccggtgggaaaacgccctctgcctgatctacgccgccgggctgctggcctggggcgtggtacgcaattttgccgggctttgaccctgtttttcccaaaaaaccgaaaaaaatcggacaaaaccggttccgctgtacggactttttcgtctttcccggtttcccctctgtacttttttcttttttgtgctatgatggacgcggacagtgcgcttgcggccacggggaaccgtgaggggcgcggctgtccgccatttcttttcgctgctactacaaacgtgcggccggtggccccggcgcatcgaaacagacaaaaagaggattcatgagtacactgatcgaacgtgtcaagcggcagccccccgggcgcatcattgccatgggctttgccgcggtcatcctgctgggctcggccctgctgatgctgccctgcagcgtcaaggacggcgttaccctgcgctatattgacgcactgtacacctccaccagcgccgtctgcgttaccggcctcatcgccgtggacgtgggcgacacctttacccccctgggccagaccattcttgccctgctcatccaggtgggcggtctgggcgtcacatcggtgggcgcgggcatcatcgtggccatgggccgccgggtcaacctgaagggccgcaccctcatccgggaagccctcaacgtggattccggcaagggtctggtggtctttatcaagtccattttctggaccaccctgatctttgagttttccggcgcggccctgagcttcctggtctttgtgcaggactatcccccgctgcgggcgctgggcatcagcctgttccactcggtggcggcgttcaacaactccggttttgacattctgggcaatttccagagcctgaccaactacgccgacaacgtactgctcaacctggtcacctgcgccctgatcttcttcggcggtatcggtttcctggtcatccgggaagtctgggccaaaaagttccgctggcgcaagctgtccatgcacgcccgggtggtcatctccttcagcctggtgctcatcgtcatcggcaccctgctgctgaaactcaccgaggacatcacctggctgggggccttcttccagagcgtctccgcccgtaccgccggttttgccacctattctctgggcgagttcacctccccgggtcttttggtcatgatcgtgctcatgttcatcggcgcgtcccccggctccaccggcggcggcgtcaagaccagcaccgtgttcgtgctgttccagggcatcaagtccgccgccaccaacaagtcggaaaaagctttccactattccatcccccgggaatccttccgcaaggcggcggtcatcaccctgctggccatgtccctggtattgaccggcacctacctgatgaccgtctttgaccccaacgttccgttggccgacgctctgtttgaagtggtcagcgccttcggcacggtaggtctttccaccggcatcacgccggggctttccgacgcaagcaagcttttgtccatctttattatgtatgtgggccgtctgggcccgctgaccatcgcgacgctgtggtatttcagccgcggcgagcgcacccattaccctgtgggcaacatcgccatcggctgatgggcagcccctcaacagcaacaatcaggaggactccgtcatgttccacaaacataaaaaaggcaagatttcctacggcatcgtcggtctgggccggttcggctcggccctggcggtggcgctggcacaggccggcgccgagatcctggtcattgaccgggacgaggacaaggtccgcgaactgcgcgaactgaccgaaaacgccatcgtggtcaacacgctggacaagaaaaacctgaccgagaccggcatccagaactgcgatgtggccatcgtctgcatcggtgagcacatggaaagctccatcctgaccaccctgaacctggtcagcctgggcgtgccccaggtcattgccaaggccaccagcgtggagcacggcgagattttggccaagctgggcgccgaggtcgtctaccccgagcgcgacatggccctgcgcctggccaaccgtctggagaccacccgcgtgctggacttcatccagctgagcgagagcatcaacatctccaagctcatcgtgccggacaagttcgtgggtaagaccattctggagctggacatccgcgccaagttcggtctcaacgtcatcgcggtggagagcggcggcaaagtcaccgacaacatccgccccgactactgcttccagcccaacgacgtgatgatcgtttccggcagccgggacgccctgctgcgcctggacgagtgggacgaaaacgactgatcttccccccttataaaacccaaaaggcccgatgccgttttgcaggcatcgggcctttttctgtatatcctggcgcttgtcaggcggattgcaggtcctggtaggcggggttgtcggccaggaaatcggcggcgtcgatcatagcccaccgctcgttgacatcggtgcccacaaaggtcatgccgtcggagcccacggccaccgcgtcctccatccgctgctcatagcagaccagcagcttgccgccgccctgccccaggatgcggattcccttgacgtggccgttggagatgtaatggagggtcagttcccgggcgctgccgtcggcggggtcgatggcggcgcggcggtcgcccccttccagggtggtgacgtcggcaatgaccttgccctccaccgtccccttgatggcgatggtgtaaatttcctccgccgggatgtcaaagggccaggccacggcggtggtcgtgctcttgcccgtggcggggtcgatggcggtcagatcccccaggctccggtcgggcagcagatagatggtgccctccgccatggcgcaggtgcttcccgcgctgcccagggcggagttccaggcggccagttcccgctcggcgccggtgtccacgtttttggcgtagatacggtggctgccctgctggctctcagcccaccgggatacggcggcgtcgtactcctcctgggtcatgccgtcggtcatctcgggcatgggggtgtcgtcatccccccagtggaaggtgtaaaaaatagcttcccgcccggtacaccccagcagcccggcgtcggattccacgggatagggcaggtcaaagagtttttccgcctcgcccccggacagggagacgcggtacagggcgttggcggcggggccttccccgtttgccgtctcctgttcaaagtagagccattccccgtcggtcatgcggggggacaggtaggaggcactctcgtacagtaccttcgggtcggagccgtcccccttccgcagggtcagggtcatggtatccatgccgtacccggcgcagagcatatccccgcccaaaacgtagctgctctcgctgacttcggggtcgatccaggcggtgcaggcgtcgctgtcatgggtgcagttgggctgggcgcagaggatggtctccaccgcgccgccgtagtccacccagcaccgcaggctgctccagccgcccgcgccgtcgctgcggataaagtttgtgtacatgccctggtcgttgccggaggccagcagttccagcgcgcccgccggggcgctttcccttgtggcgttgacaggggtgtgggtattgcccgcccggctggcggggccgcagcctgccagggagaacaccacggccgcggcggtcagcccggccagagggcgaaacatggctttcttcatatccgtttcctttccacatctggtcagcaggcaaattcgccgtcaaagccttccaccggggcaatgtcccggtaatcgggctggttttggaggaacgcctccgggtcgatgagggccaggcgcacctgttcgatgtccaccgtgcccaccgagccgtcatcctttacctcgtcctgggaggtcaggcggttttcgtacttgaccagcaggccgtggctgctccgggccagaatctgcacgctctcggagcgaccgttgcggatatagcccagggtcagctcataggcggagccgtcggcggggttcaccgctgcccggcaggaccccatgtccccgtactggtccacaatgagcttgccgtccaccacggcgcagggagtggtctggtagatggtcccgcatccggcgcggctgaaatcccagttcacgggcatgcgggattcctctcccgttttcacgtccaccacgcagaggctgcccgccgcggggtcataccagtagagggtggccccgtccgtgtccaggtaggggttgctgatgttgtcggaggaatagctcacatccagcagcacccgggtggccccggtgtcgatgttgtacgccgtgtaggtcagggtggtcagggcagtgccgtcggcctgctccgcgctgccgtagacggggtagaaaatctcccggcccaggcagccctccacatcgtaggcgttgagggtgaccagttcttccggctcgcccccgtccagcggcacccgccacaggttcagcccctgcccggtcaggcagtagagccattggtcgtccgccatggtggggatgttgttgtttgcgctccggcacagcgttttttcctcggtgccgtcgggggcgcagagggtgagcacatacacctgctcttcgccggagtcctccaccgtgttggtgacgatgtgctccccaccgggcagcgcccaggccgacccgccccagacgccctgccaggcgggacagttcccgtcactgtgggtgcagttgggctgagcgcagagcaccgcggcccgggtctgggcgtaatccacataacccagcaggtcggtgcggtcctcgctgccccgggtcaggtccatgagggacaggtaatagccgtcgtcggtgccgtgggagagcatctgcagctctcccgatgccggggcggtgtcgggggccgactcctgggtggccaggggttcggcgtagtcctcataccccggggtgcaccccgccagggaaacggccagggccgcggctgccgtcagggcaacggcacggggaaaactctttttcatataaaggcctgcctttctgcgcggttccacaaaacagctgactttgtctgccgtttctcttgcggccgcgtgttctcgattcctgattcagacgccgcccgggggcggtatgctgtcagggtaccacggccccttgtcatttttgtttcaccgcggggatgttttacaactttgccccctcagccccgctccatccccgaaagattggtcatggtcaggcgcagggagttttcctccgccgcgcagtagaggtagacctgggccttgtccgaccaggaggacacccccgtttcggtgctctcgtcctgccagtctcccagcacatccagccccagatcctgccgccaggcatccagcacggcggcggggtcggcggcgggcaagtcccccgacaggttcagggagaccacatccccggtggcagtgtcccacacggcggagacaaaacagttcccggccacggcggcgctgacctgcacccccgcaaagttgccggtgcgctgggtcagacaggaggtgtcctcctcccctgccgcggcggcgtccagggcgggctgcaccgcggcgggcatttcccggggcaacaccccgctgtccgccagacggtccaggcatcgttccagttccggcagcagggacacatccccctcctgccagccgaagttccccggctgcagccgggtgcggtacaggtcgtacagaacggggatggcccgggcttcctcgtcgggcaggcccgccacggcgggacgggcggcagggccgtccagaagggcagcctcctgccgtgcgccccagatgcccggcagcagcaaagacgccccgcacgccgccagcacccccgccgtggccagaatggcggggagttttccccggaaacgggcggaaaggttcagtctgaacatggcgcggcctcctcccccggtctcaggtccagggagacgctggtcccccgccccggttcgctgtcaatgaccagaaaactgccgtgggcccgggcgatggccgcgcacaggctcagccccaggccgctgccgccccgggcgcgggtgcggcttttgtccgccatgtaaaaggcctcggtgacgtggggcaggtcctccgccgggatgccccggccgttgtcctgtacccgcagccgccaggcttccccctgccgctcacaggtcaggcggatgacgcccccctccgccggggcggccgccgcggcgttgaggatgaggttgcgcagaaggtccgccagcagcgcccggttggccagcacctttgccccgggcgggcagctgctttccagccggacgcctcccaggtcgggcaggctgcgcaccgcgtccccgaagatccccgccaccggctccggccgcagggcggggggcgggccttcctccacccccatgagggtcagcagttcccggctcaggtgttccagccgggcggattcgtgataaatgtagtcggcggccagctgccggacgtcggcgggctgttccccgctgcgcagcaggtcggcatagcccagaatggccgtcatgggggttttcagctcgtgggtgaaggccgccacgaaccgggtgcggctctcgttctggcggcgcagggcgtccatgttgctctgcaccgcccccgccatggtgttgaagccttccgccagacgggcgaactctcccccgcctttcacctgcacccggcgctcataccgccccgccccgatgtcccggctggcggcttccagccggcgcaggggccgggtcagcgcccaggccagcagggccgcggcggtgagggccagggccagggctacgcactccaccaccagatactgccggacctggcggcggtgctcggtgaactggcgggtgacgtcgtagccccccaccaggtaaagttcttcctccgttgtctgcaaaggggaggccagcagcagataccgggcgtcggcggtgccgcagtagaccatgcctcccgtgccggcctccaccgcctgccactggtcggcaaagcggacggcggcgggcatgtccgaccacaccaccaccccctgcccggtgagcaccgaaaaccggtagttggtccccccgccggaaagctgcagccccgcggcgtagtcccgcaccgcgtcggcggcatcgggcagggtgtccacgccggagagcaggtcctccacggcatagcgctcccgcatatgggccacggcggcgtcggcggcggaggcatccagggcggcggaaaagttctgcccgatggtccacgccccgcctgccgacaaggtcacgcagagcagcagcgccaccgccagggtgagtttgtgcgcaaagttcatggctccccctccaaaagataccccaccccggacacggtgcggatcctgtctccccagcccagctttttgcgcaggcgggagatgtacaggtccagcgcccggggccccgtgtcgctgtccagcccccacacccgttccagcagcacgctgcggtagagggcgatgccccggctctggagcaggaccatcagcaggtcgtattccttgggggtcagctccaccggctggccctcccgggtgacggcccgggcttccgggtcgatggatacgtcccacagctgaatttttgcgctgcggcggccggtgtgacgcataagcccgtccacccgggccagaagttcctccggggcaaagggcttgacgatgtagtcgtaggcccccaaccgcaggcccttgacccggtcctccacactggagcgggcgctgagaaagatgaccggcgtgccggtgggggcgatgtattccatcagaccgaagccgtcgatgccgggcagcatgacgtccagcaaaatgaggtcgaacttccggctcaaaatcaggtcggcggcctgctccccgctgtgggcctggacgcaggtgtactgcatccgccgcaaggtcaggtcgatgaggtcggcgatgggacgctcgtcctccacaatgagaacgggatacatgggcttggctcctttccggtcatggataagggaattttaccccggggaattgtcatttttgtttcagccctccgcaaagggcctgtcagcactatggtacaatattttgccccgggacgccaccgggcagcaggccggccgaggaattttacacagggatgccggtaccgccgggcggcggaaaaaccgcgatggattgcggttcggtaacattttggtgccaaaagttcccggtatggggtgttttggttgatttttcgcccattgccgttataataaatatgttgtctatgttgtccatcatcaacaagatgtacaccaaaaggagaatttatcatgaaaaagctgatttctgccgtcctggcgctgagcctggccctgtccctggctgcctgcgcgggcaatccttcttccgaaagccagtccaccgcggaggagtcctcttccgtggccaccgacagctctgaggacgccaccgccgagaccggcgccaccggcgaagtgctgagctacgacgagtacatggccgccgacgtggacaccctggtcaccgtcgaggcttacgtccaggccaagcagttctactacgccgaacagtccaccgccaccgtctacgctcaggacgaggacggcgcctacttcttctatgacatggcctgctccgaggaagactacgaaaagctgaccccgggcacctgcatccgcgtcaccggctacaagagcgtctggtccggtgaggtcgagctgatggaagccacctttgagttcgtggacggcgccgataccttcgttgccaccccgctggacgtcaccgacctgctgggcaccgaggagctcatcgaccaccagaaccagctggtcagcttcaccggcctgaccgttgcccccagcaccgacgccaacggcgaggaagctgctttcctgtacggctgggacggctccggcaccgagggcgatgacctgtacttcaacgtttcctacaacggcgagacctacaccttcctggtggagagctacctgtgcgacagcaccaccgaggtctactccgccgtcaagaacctggagatcggccagaccatcgacgccgagggcttcctctactggtacgagggcgtcaacccccacatcacctctgtgaccgtggcggagtgatcggctcccgaccccgaacgggtttcccggtttgtaaactggatctgtgaaaaggacctcctgcccggatgggcaggaggtccttttttgatgcggtacggggacgccccgggtcaaaaacaaaaaaaatgaccggttccgaagaaccggtcaagtttggtggacggtacaggactcgaacctgtgacctcctgcacgtcaagcagatgctctaccagctgagctaaccgtccatgtctcgcgacttgattattatagcaaagcccgccccaaaaatcaagcctttttgcaaaaaaaatcttccgaaacccgatttttttcgggctcggaagattttgctgatgcttcgtctgtttttgccgtcaatccggcggcggaaaagggggaaaaatcagaaatagcagcggatctggaacttgtcctcttttttctgttcctccaccaccagtttttcgtggttaaagtcaaagtggacgctgcggcagtcgtcggtgttgcgggtcaggcgcagcagggtgtccacccgcttctcctcctccttggtgtagaagaggtagctggcgccctcgcggcgggcgcggccggtacggccgatgcggtgggtgtagtgctcgttgtcctcggggacgtcatagttgatgacggcgtccacgtcggagacgtcgatgccccgggccgccacgtcggtggccaccagcaccgcgatctcaccggcgcggaagcggctcatgatgcggttgcgctccgcctgggacaggtccccgtgcaggcagtccacattgaagttcagccgggccagctgattggccagcatgccggtgttgtacttggtgttgcagaacaccatcacccgtttgtagtcctccgagatgatgatctgcgccaggtcggacagcttgtcccgcccggtggtcagcagcttgtactgggcgatcttgggcatgctttccagcatgggctggacgtccacctcggcggcgtttttctggtacagccagccgatgtccagtacctcccggctgatggtggccgagaacatggacaggctcttgcggtgcttcatcaggtcgatgatatgccgcacatccttgtaaaagcccatgttcagcatctcgtcggcctcgtccaggaccaccgtctccacctcgctgacgtcgatggcatggtggcggtaatggtccatcaggcggccgggagtggccaccacgatctggcagcccgccttgagctgtttctgctgtttttccagcccggcgccgccgtagacgcagacgatgcgcaccccgtccatgaactgggccaggtcctgcaaatcggctgcgatctgctgggccagttcccgggtggggctgaggatgaccgcctggggctttttgcgggcggtgtcgatctgggacaggatgggaatgccgaaagccaccgtcttgccggtgccggtgggggccttggcgatcatgtcgtgtccttccagcatgagggggatggctttttgctggatctcggtcatttcggtaaagcccatggcctgcgtggcgcgcaggatctcggggcgcagggataactcactgaactgcatagccgtgtttctgcctttcttccggggcggccctgccccggcgcggcgcgccgcgcttttgtgggaaaaaccgcctgctgtcatcaaaattctgtcatctgttccccattataccaacaatcccacggcagggcaagcgggctttgcgcgggatatacaaggcagggcgtcaaattttggcaaaactgcgcgttggtgaaatgctataatgaaaccagatacaacgcgggctccccaacaggccgcagatgctgccgcacgggacgggaccgcgtgagaaacgcccggcactgccgcggcaaaggaggcaacacgcatgagaaaatccgcacaaaccgtcatccgggagggcgcctattacaccatcgccgcggcaaacggccgcgtgctggaggttgccgatttcaacaccgaaaacggcgcgtctgtgcgcctttggagttatgagggtcagccctggcagcagtggacctttgaagaagccgccgacggccagtaccgcatccgcaaccgctttaccggcaaggtcatggacctggccatgggcggcgtggccaacggcacctgggtccaccagtggtcggtgacttccggcgccagccagcggtggcaggtcatgcccgccagcggcggctgcgtcaagctgcgcaacgtcctggccgacaaggtcatcgacctggtgggcatgcgggtggacaacggcacccaggcccagatctggcaggacgtctttggagaaaaccagctctggcggctggaccccgtgcccgacaagctgctccagaaagacccgcccccgccggtggtgacccgggcacccaagagcacccgcacccagaccggcaaaggcacccgggccaaaaagaccgccggcaagggtgctgcccgtgccagaaaggcaaagtaaggctccggagaaaccggcgtcatcccctgacgcccccgatgttccaaaacacaaaagcgcgcgtccttttccccgagggcgcgcgccttttctgttatttgcggcaggtcagcggcgggaggagtcctccgggctgcaggccttgcggtaattgcggatgtgcatatagatggtgtttttggagatgcccagcaggtcggcggcaatgaccaccgcgtccttgaggcggaacattcccttgtcgtacagttcctccacaatggccttgttcttgttggagggcaggatggaggcatcctgcatgacccgggcgcggatgtcttccagggcagcctcgatcagttccccggtgttggaggcaaaggtctcccgggcgggggcgctgatgccggcaaaacggtcgggggtcaggtcggccaaaatctcggacaggggggtgttgagatacaggttgatgcacagcaggcccacgatgcggtcatgctcgccccggatggcaatggtggtggacttgaggggctccccttttttgttggtgctgaaatacgcggtggagggtttgccctgggacagtacgtccagcatatccagagccaggtcggtgatgggcgcgcccacggtacggccggtatgcgccccgttgacgatggcaatgaccgaatggtcgtaatcctccagggaatgcagcacgatctcgtagctgctgccaagatatacggccagatcctgtaccaccgggatataggattccaaaatcactcggtctgtttttgtcagctttacctgtccagtacgccctgccatatctctgtccgatctccgctttctatcttagattccattccatattttacacggaaacccaaaatttgaaaagacctctttttatcgttcggcaaactctttcagggcggcgcagatgcggcgcaaggcgtcgtacaccttctcgtcgtcccggtagacgcccagcacgatgcgcaggtgtcccgcaccgccggggccgtagttggcgccgtcgttcaccgacaccccggcgtgttccagcagccaggccgtgatctcccccgagtctcccagggcggacacatccacccagcagaggaagcccgactggggcatctgcatcgagacccccggcacctggttgagcagttcaaaggccatcttgcggcggttgtcgtaggcatgggcaaactgctccatgaactcggggtgttccatggcggccagcaccgctttctgggcggaggtggaggtcgccccgatgaccgccaccgcgttggcgtacagcttgtccatgatcttgtcgtcacagacgatgtaccccacccgcaggccgctcaggcccatgcccttggagaaggagaacaccgtcacggtgcgctcgaacatgccgggcagggcggcgggggtgagcatctcattgccgaaggtgaaatcctcaaaggcctggtccaccaccagcaccaggtcgtgacggatgacaaaatccgccagcccctgcagggaatcccggtcgtagacggtggtggtgggattgttgggatgggtcagcagcaccatcttggtgcggggggtgaccagccgctccatggcttccaggtccagctggtagccggtctcggctttcagctccaccgccacgggacggccgcccatgatctccacatccagaaagttgttggggtagctgggagacgggatgagcacctcatcccccggcttgacgaagggcagcaccgcaaagtacagccccgagtccgaccccggcgtgatgaggatgttgcgctgggggtccacggtcaggccgttctgggttttcagcttgcgggcgagggccactttcaggtcagggttgccgatgggggcggtgtagtgtggggcggagtcctcccgcacggcgtccagccaggctttttccacaaaatccggcatggagcggtcgggcatgaaaggatcggcccagcccatcagggcaatgccccggcgttccagctcctgataggagccgcccacgtccgccttttccacggcggtgaacaggccgccctgggcgcgggcgaaggcgtcgttcattttggattgaatgtccatatggttttcctcccggttgaagggacggcagacaaaagccggacgcgcaggcgcgtgtccggcttttgtatgtatggactgccgccctctctatgaaagatgatggcatatcagggtcccggctgtcaaccgccgggggtcaggatcactgcttgctttcttccggcttccagaacagcacggtgagcacggccgccaccacaaaggcgatgacaaagccggccatgaccatggcgcagttgtacatggggttctcgccgcccatgaacatgccaaagctcaggaaggaggggccgccgatgacgtaggccttcagatggaagaaggaggcaaaggcaccgccgcaggcgccgccgatggcagcaaagaggaacggcttgcccagaggcacgttgacgccgtagacaacaggctcggtgatgccggtgcaggctgcgaaggcagcggaagcggcattgcccttgagggtcttgttcttgctcttgagccagacgccgaaggccgcgccggcctggccgatgttggctgcgccggaggtgggagaaacgtagttgaagccctgggtggcgatcatctgggtcaggacggggaccataccgtgatggatgcccagaacgaccatggcggagtagatgccgccgtagaccaggccggcaaagacgccgccgtactcaaacagccagttgacgcccgcggcgatctcctcgcccagccagtaggtgaaggggccgacggtgagcagggtgatgggggttgcaatgaggatggtcagcgccgggaccaggatgatcttgagggcgccggggatgtacttgtccaaaaagcgctccacgtaggatgccagcagaatggcaaagacgatgggcagcaccgaggaggagtagtcgatgacgcggaaggggatgcccaggaaggtgtaggtctcgacgccgtcggcgatgaggccggaccaggtggtggacatcatggccgcgcagatggtcagggccacgaactggttcatcttaaagaccttggccgcgctggctgccagcaggaagggcaggaaggtgaacaccgccatggagatggccacgatgacgttgaaagtgggctgggaggtggaggcgccgaaagccatgaagatgcagatgaaggcggacaggaagccgcagcctgccagcgccgggacaatggggttgaagatggccgccaccgtctcaaagaaagtggtgagcagcttgccctttttgttggcaagatcctgcttgaggtccaggttttcgtcgatggccgcttcctcatcgacgccggtgagcgcaacgaactccttgtagacgttgttgacctccgccccgatgatgatctgcacctgggtggcgccgtgcaccacgcccagaacgccggggatctgtttcagggcttcctcatccaccttggcccagtccttgggggtcacgcgaaggcgggtggcgcagtgtgcggcctgggcaacgttttccttgccgcccacggcctgtacgatttgggataccggaatttgctttgccatgatccttcctccttagaagaatttattgaaaggcgaccacttcaacttccacaagggcgcctttggggatatccttgaccgcaacgcaggagcgtgcgggcttgccggtgaagtacttggcatagacttcattgaactgggcaaaattgccgatgtcggacaggaaacaggtggtcttgaccgcgtcggcaaaggtgtagccggcggcatccagaacggcggcgatgttcttcatgatctgctccgcctgggtggtgatgtcgctctccaccagctgattggtggccgggtcgatgggcatgacgccggacaggtacaggaaacggtcggccttgatggcctgggaataggggccgatggctgcgggggccttttcggtggaaatggtttcgagcatatgagtcctcctccgaatgaatgaaatttatttcatctcaatcatagcatccgctttccccgctgtcaaggatttcactgcattttatttaattaattttcagactactacaaaatttttgggtattttaggggatggtcttgcaatttaccggccggtatggtatttttaaggggaagacaggctgcaaaccagtaaaatttatttcatcataaggagaaaccgccatgagccagctcaaaggattcccgaaagacttcctgtggggcgccgccaccgccgccaaccaggtggagggcgcctgggatgtggacggcaaaggtcccagccttgccgacgccatggtcgcaggcacccatcaggtcccccgccgcatcaccctggacatcgacgacggcaaatattactaccccagccacaacggcaccgacttttaccatcattataaggaggacatcgccctttttgccgagatggggttcaaggtctaccgcatgtccatcaactggccccgcattttccccaagggcaccgagacggagcccaacgaggccggcctggccttttacgacaaggtctttgccgagctgaaaaagtacggcatcgagcctttggtcaccctctatcacaacgagatgcccctcaacctggtcaccgagttcgagggctggtccgaccgccggtgcatcgactgcttcctgcgctttgcggaggtgctgttccgccggtacaagggggtcgtcaaatactggattcccttcaatgagatcaacgacctgaccacccccgtgggcaactggaaccacggcggcatcctgaaccccggcaccgagttcttcaccgatcaggccgacgaccccgacaagcgctatgccgccctgcacaatcagttcgtggccagcgccaaggcggtgctgctgggccgggagatcgaccccgaattccgcttcggcaccatgatctgccacatcaccgtctatcccctcacctgccaccccgacgacgtgctgctcacccagcaggaggacctgctgcgcaactgcttctccggcgacgtgcaggtcaagggctattatccctactacatcaagcgctattttgagcgcaacaacatccacttccccatcctgcccggggacgaggaagtcctgcgggcgggcaaggtggatttctacaccttcagctactacatgaccaactgcgtcaccgcccagaaggacgcggcccaggtgtcgggcaacatcatgggcggggccaagaacccctacctcaccgccaccgagtggaactggcagatcgacccggtgggcctgcgctacaccctcaaccacatctacgaccgctacggcgtgcccatcatgatcaccgagaacggcatcggcgcccgggataccctggaagccgacggctcggtgcacgatccctaccgcatcgactatctgaaagcccacatcgagcagatgctcctggccatcgacgacggcgtggagctggtgggctacaccccctggagcgccatggacctggtcagcgtctccaccggcgaggtggaaaagcggtacggctttgtctacgtggacaaggacaaccagggcaacggcaccatgaagcgctacaaaaaggacagcttctactggtacaagcacgtcattgagaccaacggcgaagagctgtgacccccgcgcccccataaaaggcgcaaagccgctttgcgctgcgccagggatgccttccattttccaagatttcctccccttttttttgcatttgcttatacacagcaaaggagccttccccacatggggaaggctcctttgccgtatgttggtcttttttgccccgctttacgccggcgggtcatccgcccacagcaggggggcgaaggccggcgcactctgccacaggtcctccggcgggcccgccaggtagccggaccggtcggtaatccccaggttttccaccaccgcccggccgtccccggtcagggcctgcaccacgcagggtccctccagcacgctctggcggacctcccccgtggtggggtcgtagaagatcaccgtgtcgtcataccacaactgcacccagggcaggccgcagtcgggcgcgatgtggtaacccaggttggcatcgtcgcccagaacccgctctatcaggaggtcgggcaggtcggtctcctccatctctccggtgcgcaggtccactatgttcacacggcagacgccgtccgtagcgacccccaccgtgaccagtttgtcccgggcggaaaccaggaccgaccactggggatacagctcgaaatagttgcctgtggagacggcgcgccgctcccctgtggccgggtccaccagctcatagcaggacaggctggtggtctcccccgccgagcccagggcgctgctccagtaatggaggatgtccatggggtccaccgtccgccggatcagcagacagccgccgtaacagccaagcacttcctcgtaccggaaaaaccgcgccgggctttgggtgatctgcccggtggtcacatcgcagaccaggtagttgtccgccggttcctcgctctcccggtaggcaagggaccgggtaaagtaggctttggtcccgtccaccgccacgcaggtccagtccgatgccgcctccggcaggtcggccaccgtctcccgggtcaggccgtcggcggaaatgcgctcgacgcccacccgcagaaggtcccggatgctttgctcggtgacttcccagccgtttcccatcagcatccccacggcctggtcctcggtgttgatgccctgctccccggaaaacgccagatagacgcagccctccgccgcaaacagagcgggcgggctgtacgtcatttcctcccggctcagccaggcgggacagtcggcgttgtcatgggtgcagccgggcttctggcagacgcagccgtcggtgttggcggtgtagtccagataccgcacctggcccgaaccgtcgtccaggtcgcggatgtaatagccggtgtccccgtctgagtagacctttctgtcccactgggcgggctgtttcagggtttcccggtccagcatttcgctggtgatggcagagtcctccgccgagggggcaaaggtccccgcggccagcatttcggcggtgcagggctgcagttccagccaaaagaccgagccgttttcggtttcgctcagccagcagatggccatgagttctccccgggcgctgtacaggccgaagtcctcccagcaggtgccggtgggcaccgcccagtcccccaggtcctccaggtcgttgaggacgatccactggttcaggatctcccgggcatcgctgaattccgccagccccggccaggtggtgcggatgtacagctccacaaccttgccggtgcgggcttccatggtaatgcccagacggcggacgtcccccgcatcgcaggcaatggacagaaagcccagggtatcgctggacccggacaggttgtaatccaaagtcaggctgtcggcggccaggtcctgataaaagccgtccacccagctgctgtccagaattcccagcccgacatactcgtccatcacctgctccaccttgggggccaggttgtagtccaggggcaggctgccggtggaggcgtaggtctggtagtaaaagcctccctggccgctgccgtcggacaggctgctttcatagttggcgtcccggcgctcatggagcatgcgcaccagatagtagtcgctgcccttgggggtcagggactggtagccgccgtcggtctgttcccggctggaaaagagggtggtgtccgcaatggcaaacatggcggcgggggccagcgcccccagcaccatcaccgctgcacaccccaccgcccagaatgggaaccgcctgcggggggccatgtcccccaccggctcccgaagccccgaccagtccaggtcagcttccgggggaaagtccgtgtcctccggggatcggcctgcgtccggctgcccggcagagggtcctcccgtgcctgctgtattttcagtctccggggtgcccggggcgttttgggtctccggtctttttcgaccgtcctccccggccttggggcggcggtttttgggatgcaggaatttcacgggttttcacctccttggggcgggcagggggtcagggtcacggtgatgcaggtcccccggccctcccggctgcggatgcgcagttccgtcccgtgggcctgggcaatgctgctgcacagggccaggcccaggccgctgccgccgcttttgcgggcgcgggatttgtccaccatgtaaaagggctcggtgacccggctgacggcctcggcggggatgccgatgcccgcgtccgccacccccagcaggatgttcccgcttttctggcggcggcagatgacctccacgatctgcccctcccggctggccttgacggagttctggatgagattgcagagaaggtcggtcaaaaggtcggcatccccccgcaccgtgagggcttcctccccgggcatgcgcagggtgatccccgccgcccggcagaccggggacatggaccgctgcaccgtccgcagcaccccgtccagggatgcgggggtcagggtcagctcctcgtcgctgagacgcagcagctgcagcagtttgcggctcagggtttccagccgcttcgcctcgtggaagatggcgccggcggcttccttctgttcgtcggggtcgcagtgcatactgcgcagcatatcggcgtagccgatgatgctggtcatgggggttttcagctcgtgggtgaaagctcccataaagtcgtcccgctggcgcaccgaaagttccagctgggccaccttgtcctccacggctgcggccatgtggtcaaagctgcggctgagctgggcgatctcgtcatcgccgggcacggcggtgcggcggtcgtaggcccccgcggcgatctccccgctggcacggttgagcagggccagaggccgggtcatgcgccggctgagcaggaccaccaccaccgcggcgcagagcaataccgccccctccatggtgagaaaccgcagcaggctgcgggtgcgggcggcgtacagcgagctgacatcaaacaccgagaacagcctggccccgtccagcagatcggagcagtagacggcgctgaccgtctcccccgtgcggacgtagcggatctgggaggactccatctccatgggctgcacctcccccggcagctggccgcagaccagtttgtcctgataccacagggcaaaggtactgccttccggggcggtgtcggtcagttcctccacctcggcagccagggcgtccccggtgacggcgtcgcccaggctgtacagggaaaggatctcgctttccacggcgtagcaggccagggagtgctgggcctggttctgggcgtcggcctcggccaggcggtcggcaaaatcgccgtagagcagcgcgcagcctcccgccgaaaaggacaccgccagcaccagcatcatggcgcagcccagtttttgggcaaacttcacggggattcctcctcttttttcaggcggtagcccaccttgtacaccgtctcgatgcggtcctgccagcccagctttttgcgcaggcgctggatgtgcaggtccagggtgcgggtctcggtcatttcgccgccccatacccgctcatacaaaacatcccggtagagggcggctccccggttgcgcatgagctgttccagcaggccgtattccagcggcgtcaggtccaacggttttccccctttggtcacggtgcgggagacggtatccagctccacgtcaaaggcggtgagcacccggccgcccttgccggtgcggcgcaaaaccgtctccacccgggccatgagttcctcaatttcaaagggcttgaccaggtagtcgtccgcccccaggcgcagcccctgcacccggtctttcagggcgcttttggcggtgatgaagatgaccggcgtccccatggggcgcaggtattccagcagagagtagccgtccagtcccggcagcatgatgtccagaagggccaggtcaaagctgttctgctcaatgcagttggcggcctgcatgccgtcgttgatgacggtacattcgtaccccgcccgggagagactcatctcgatcaaccgggcgatattagtttcatcctcaacgatcagaatacggttcatggtacggcgactcctttccctgtctgcacagcattccagattacacaatagcagagagttgtatccgggttgtaacgttttgagacaaatcccggcagcagagcggagatttcccggaaaatcaaaagggacggcccccggacggaaggcgcagcgtgatgcgctccgtcgacgggcgtccccgggatggcggcagatgccccgggccggggcttttctgcacggccgtatgagaaagcaaaagggcaaggcccggatgcagccgcgctcctgccccctgcccggcttggggccgggccttgggcggggcagaatccagggtcagacggaggtcagcgccgccagcggaggatgtcctccaaaggtttgcggggccggggcgcgggggattcctcggggtagcccagggccacggcggccaccagctgcccctcctcccccagccaggcggacagttccgggtaggcaaagtagatgtcgcagatccacaggctgccgatgcccttgtccgtggcggccagcagcaggttttggatggaggcactgatggactggatgctgcagatttccaagacccgctcttccagcgtctgcggggcgtccattccccggcccagagggttcaccgccagcacggtgacgggggcctgttccatgatgtccccagtgtgggccgccgctgcaagatattgtttccactggggcgggcagtcatcccgggacccttcccgggcaaggccgcggcggtaggcgtccagcatttcgtgtttggagttccctgtcacgatgacgtatttccagggctggctgtttttggaggagggcgctttggcggcgctgtccatcagttccagcaggtcccgttcgtcaatggggcgggaggaaaatttgcggatgctgcgtctgtcgtagatggcggggatcatgggacggcacttcctttccggtgggtattttccgggtaatattatttatgttatagcatatcaaaaaagggattttcaaggatgggcggacaagggggttggttcttgcttttgggaaagcgacaggcaagggaatgtttttctattatagatttttataaggaaaccggaggttctttttctgctgcgacgcttcggggaagcgtcatccaacaacagactgccgctttttgtgcggtcaaaaagcggcggaaaaacccgcccctacttccgacgcggggagcacggctcaaggggcctgcgggccccttaagaaaccccgggggcttcaaagttgtccggccggaaattgcctcgccctacgtatggtacccggtcatcaaagttttttgacctcggcacggtcagctccgaccccggcctcccgcatttgtgcggcggcccgctcccgcaggccgccgcctggaggaaacctccattgccatcccgttcactccctcctgcccgaatgtcggatacagtgacacagcttccgtctttttttcaacaaaccgcacacaacagaaaatcttaaatccatcggacctgtactcaatcccccgttcccctctccacgccccacctcccccatacactctccaaaacaaaacaccccgccctccaacgccccaccaaaaaaccacctccgcaaaacaaaaaaaactccccctgcatccctttcgggacacagggggagctcttatttcagcttaggtcggacgaatccaactatgccgttttgccaaggtgcgggctgattatttgtacagctcgaccagacgggtcagatgctcgtaacgagcctcggcggcctcctggttcttggcgaacagctccttggcacgctccgggaaggcgcggctcaggcggctgtaacgggtctcgttggccaggaactcctgatacttgtccatgttgccagccttggaggtgagggtgaacggattcttgccctcggccttcagagcggggttgaaggtgaacaggttccagtagccggcctcgacagccttcttcatctcgttctggcagttggtcatgccgcccttgacaccgtgcagctcgcagggagcgtagccgatgatgatggacgggccgggataagcctcggcctcggcaatggccttgacagcctgagccatgttggcgcccagagcgatctgagcaacgtagatgtagccgtaggtcatgcagatctcggccaggctcttcttgctgatctccttgccggcagcagcgaactggcagacctcaccgatgttggaggccttggaagcctgtccgccggtgttggagtacatctcggtgtcgaagaccatgacattgacgtcgtggccggaagccaggacgtgatccaggccgccgtagccgatgtcgtatgcccagccgtcgccgccgaagatccagaagctcttcttggccaggaactgcttgtccttcaggatctccttggactcgtcgcagccgcaggcttccagagcagcgatcaggtccttggtgggctgatcgttggccttggtgttggccttggtctccagatacttgtcgatgacagcatccagatcggcgttcttgcccttcagagcctcgaccttcttgatcaggttggcacggacggtctcgtaaccgatctgcatgcccaggccgtgctcggcgttatcctcgaacagggagttgatccaggcgggaccatggccggactccttgttgacagtgtaggggctgatggaagcggtgccgccccagatggaagagcagccggtggcgttggagatgaacatcttctcgccgaacagctgggtgatcaggcgggcgtaagaggtctcggcacagcctgcgcaggagccggagaactcaagcagcggctggttgaactgagaacccttgacggagatctcggaaacaacgccggggatgttgtccttcttgcggatgttctcgacgcagtagtcgaaagcagcctgctgagcggactggctctcctgcggcttcatctcgatggccttggtggggcagacggtgacacactcgccgcagcccatgcagtccagcgggctgacagccatggtgaacttgtactcgctggccttgggcttggtgtcggcagacttcaggctctcgggagcagcggccagttcatcggcggtcaggcagaagggacggatggtagcatgagagcagacaaaggcacagttgttgcactgaatgcacttgccggcatcccactcggggaccataacggcggtgccgcgcttctcgtaagcggaggcgcccagttcccactggccgtccgggttatgcgcaaaggcagaaaccggcaggctgtcgccgtccatacgggcgacgggctccatgatgtcgcggaccatcttgacaacttcgggacggccggacagctccttggcgggagcatcgggagcggggttggaccaggaagcggggacctcgaccttgtggacagcgtccacgccggcgtcgatggccttgtagttcatctcgacaacagcgtcgcccttcttgccgtagctcttcttggcggcctgcttcatgtaatcgacagcctcgtcgatgggcatgatgtcagccagcttgaagaaggcagactgcaggatggtgttggtgcgcttgcccatgccgatctcgatggccttgtcgatggcgttgatggtgtacagctggatgttgttgtccgcgatgtacttcttgtcagcagcgttgaggtgctggtccagctcctcgtcggtccactggcagttgatcatgaagacgccgccgggcttgacatcctggaccatcttcatgcccatgtggatgtaagcggggttgtggcaggcaacgaagtcagcctggttgacgtagtaggggctgcggatgggcttgtcgccgaaacgcaggtggctgatggtgacgccgccggtcttcttggagtcatactggaagtatgcctggatgtacttgtcggtgtggtcgccgatgatcttggtggagttcttgttggcgccgacagtgccgtcgccgcccagaccccagaacttgcactccttggtgccgggagcggaggtgatgggcgcgggcttgacctcgggcaggctcaggttggtcacgtcatcgacgatgccgatggtgaagcgggccttgggagcgtccttctccagttccttgtaaacagcgaagacagaggacggcggggtgtccttgctgcccaggccgtagcggccgccggtcaggacgacatcgttcatgccggcctcacgcagggtagcggcaacgtccaggtacaggggctcgcccagggagccgggctccttggtacggtccaggacggcgatcttcttgacggtcttgggcaggaccttcagcagggcctcggagacccagggacggtacagacggacgagcaccaggccgaccttctcgcccttggcggtcaggtagtcgatgacttcctcggcaacgtcgcagatggagcccatggcgatgatgacgcggtcggcatcctcagcgccgtagtagttgaacagatcgtagttggtgccgatcttggcgttgatcttgtccatgtacttcttgacaacggcgggcagcgcctcgtaagccgtgttgcaggcctcacggtgctggaagaagatgtcgccgttctcatggctgccgcgggtcttgggatgctcggggttcagagcctcggcacggaactgggcaacagcgtccatgttgcacatttccttcagatcctcgtagtcccacttctcgatcttctggatctcatgggaggtacggaagccgtcgaagaagttgacgaagggaacgcggccctcgatggcagacaggtgcgcaacgggagacaggtccatgacttcctgggggttggattcgcacagcatggcgaaaccggtctgacgggtagcgtagacgtcgctgtggtcaccgaagatgttcagcgcctgggtagcgacggtacgggcagacacgtcaaagacgcagggcagctgctcggctgcgatcttgtacatgttggggatcatcagcagcaggccctgggatgcggtgaaggtggtggtgatggcgccagtgcccagcgaaccatgcacagcgccggcagcgccggcctccgactccatctcgacgaccttgacctggttgccgaagatgttcttcagaccggcagcagaccactggtcaacggtgtctgccatcgggctggagggcgtgatcgggtagatggccgccacgtcggtaaacgcatatgctacatgcgcagccgcggtattgccatccatggactgttttgctcttggcatttttcttcctccgtttacttcggtggtgccgaaggctccccgccttttgacccaccaggattgagcctctctccttatatttaccggcatgcgggcgtttggtgcctttatgccgacacatacagcaaacgtcccgcccgcaatcccgggcgcattttccggcattgcagacgaaactcttttggctcgttttcattttaccaaattgtttcccgtttcgtaaagtagtattgcatagaatgttatacaatttttttgttgaaatgtgagcacaatgacgatttttataatttttcgtctgtgttttgtacaaagggttttttccgctttttcgttttttatacaatcttgccaatacttttgccggttttgatgcccctcccgttttaacgccgaagaaacaccccaaaatcctatttttcggcttgcatttgtccaaaaaagtggtacaataacctcggcaatgttagctaacgctaaccaaatagtttgtgatataattgccaatgttgctcccgcggcggcggtttgttgccgtgacaacagtcctgtgtgcccgcccggggtatccttgagatacagccccggcatggtccgcagctgattttgttcagacacgtttttgcgtgtttggaatatattttctttttccgttttgattttaaggaggtcaaaccgatgcacaactatccccagtgggaaggctttgagggccgcatctggaaagaagaagtcaacgtccgcgatttcatccagaagaactaccgtccctatgacggcgattcttccttcctggccggtcccaccgaagccaccgacaagctgtggggcgccctgcaggccctgcagaaagaggagcgcgccaagggcggcgtcctggacatggagaccgaagtggtttccagcctgactgcctacggccccggctacatcagcgaggatctcaaggatctggagcagatcgtcggccttcagaccgacaagcccctcaagcgcgctttcatgccctacggcggcatcaagatggcggagcaggcctgcaccacctacggttacacccccagtgaaaagctgcacgagattttcaccaaatatacccgcacccacaaccaggccgtgttcgatgcctacacccccgagatgaagaaggcccgccacagccacatcgtcaccggtctgcccgacacctacggccgcggccgtatcgtcggcgactaccgccgcgttgccctgtacggcatcgatcacctgatcgccgccaagcaggaggactttgccaactgcggcgacggcaccatggtggatgacgtcatccgtctgcgcgaggagatcgccatgcagatcaatgccctgaagggcatgaaggaaatggccgccatctacggctatgacatttccgctcccgccaagaacgccaaggaagccgtgcagtggctgtacttcggctacctggccgccatcaagacccagaacggcgctgccatgagcgtgggccgcatctccaccttcctggacatctacatccagcgcgacctggacaacggcaccctcaccgagaccgaggcccaggagctcatcgaccatctggtcatgaaattccgcatggtcaagtttgcccgcatccccagctacaaccagctgttcagcggcgaccccgtctgggctaccctggaagtgggcggcatcggcatggacggccgttccatggtcaccaagacctgctaccgtttcctgcacaccctggagaacatgggtcccgctcccgagcccaacctgaccgtgctgtactcctccaagctgccggagaacttcaagaagtacgccgccgagatctccatcaagaccagctccgtccagtatgagaacgacgacgtcatgaagccggtctggggtgacgactactccatctgctgctgcgtttccgctacccagaccggcaaggagatgcagttcttcggcgcccgcgccaacctggccaagtgcctgctgtacgccatcaacggcggtatggacgagaagctccacgagcaggtcggccccgcctacgcccccatcaccggcgaatacctggattacaacgaggtcatgcagaagtatgacgtgatgatggactggctggccggtctgtacgtcaacgtgctgaacctgatccagtacatgcacgacaagtactactacgaggccgccgagatggccctcatcgacaccgacgtgcgccgcaccttcgccaccggcatcgccggcttcagccacgtggtggacagcctgtccgccatcaagtacgccaaggtccgcgtcatccgtgacgagaccggcctggctgtgggctacgagaccgagggcgacttccccaaatacggcaacgacgacgaccgcgccgacgatattgccgtctggctgctcaagagcttcctggagaagatcaagcgccgccacacctaccgcaactccgaggctaccacctccatcctgaccatcacctccaacgtcgtctacggcaaggccaccggcgccacccccgacggccgcaaggagttcactcccttcgcccccggcgctacccccagctacggtgctgagacccacggcctgctggcttccctgaactcggtggccaagctgccctaccactgggctctggacggcatctccaacacccagaccatcagccccgacgccctgggccactccgacggcgagcgtaccgtcaacctggtgcaggtcatggacggctacttcgatcagggcgctcatcacctgaacgtcaacgtgttcggcaccgaaaagctgctggatgccatggagcaccccgagaaggaagagtacgccaacttcaccatccgcgtttccggctatgcggtcaagttcatcgacctgacccgtgagcagcagctggacgtcatcgcccgtacctgccacaagcagatgtgatcccgtacccgctcacacggcgtacatgcccccgcgcccggacgggatctcccgcccccggcgcgggggcctttgtttgggcggtgtcccgcccggcattttgcgcatctctgtatcaaggaggaaacattccatgtcccaaacagccccttccacgcccatggggcatatccactcggtcgagaccttcggcctggtggacggtcccggcgtgcgctacgtcctgtttctgcagggctgccgcatgcgctgccgctactgccacaaccccgagacctgggctttcagcgacaaaaacgcccagacccccaggcaggctttcgacgccgcctaccgctaccataattattggaagaacaacggcggcctgaccgtcagcggcggcgagcctctgctgcagatcgagttcctgaccgagctgttccgccttgccaaacagaaaggggtacacaccgccctggatacctgcggccagccctttacccgggaagagcccttctattctcagtttgtggagctgatgcgctacaccgacctggtcctgctggacatcaaggaatgggacagcgcccgccacaaggccctgaccggccacggcaacgagaacatcctggacatggcccggtggctgtcggacaacggcaaggatatgtggatccgccacgtgctggtccccggcctgaccgacgacgagaccgccatggcggagaccggcgcgttcatccgcagcctgtccaccgtgcggcgggtggaggtcctgccctatcacactctggggcgcttcaagtgggacaacctgggcattccctacacactggacggggtgcccgtccccacgcaggaacaggtccgccgtgccgaggagcttctgggcgcctgcaccgagggctgatcctgtttttcattgttccataccgaaaggcggagcaccggtttgccaaggccggtgctccgcctttttttggcggttttgttttcccatgggaccgcccttttcctgccggggcttttcttgacagtgtccccggcccgccgtacaatagcggtacaaaataatctgcggaccgtttccggcccgaaaggagcttgcatcatgcctcacagtgaaacgacccttgacagcaaggagatctttgccggccgcgtcatccgtgtgacgctggataccgttcggctggaaaacggccacacttccacccgggaggtggtgcatcaccacggcggcgcctgcatcatgccggtgaccgacgacgatgaaatttatatggtgcgccagttccgctatgccctgggggaggaagtatgggagctgcccgccggcaagctggaaaaggacgaggacccctttgccgccgccaagcgcgagctggaggaggagtgcggcctgaccgccgacgagtacacttctcttggcgttttgtaccccacggtgggctatgacagcgagaaaatttatatctggatggcccggggcctgcacaagacgggccagcacctggacgacgacgaattcctggatgtgcacaaggtaccttttgaaaaggccctggccatggtggaggacaacaccatccgggattccaagaccattgccggcatcctgcgctatgcgctgatgcggaaggggcagtgacggtggcgggcaagacggtccgtctggggttctgcgacctggcccccgactgggacccccaggacaactattttactcagaccctgcgggcggggggctataccgtgacggtctgccgcagcccggaggaaaaacccgactttgtcatcagctgcggcttcggcaaggcatacctggactatgcctgctgccgcatccagttttccggggaggacagctggcccgatctgaatgtctttgactattccatgggttttccgctgctggaatacggggaccggtatctccgcctgcccctctacgccatgcgggacagctgggccccggcccttgccaagcacaccctgccggaggaggattttctctcccggaaaaagttctgcaactttgtggtgagcaacgatttcagcgccgagcgcaacgcctttttcgaggccctgtccgcccggcgtccggtggacagcggcgggtcctaccgcaacaacatcggcgggccggtggcggacaagctggcgtttcagcggcagtacaagttttccattgcctacgagaacagccgtgaccccggctactgcaccgaaaaaattgtggacgcctttgcggcggggacggtgcccatctactggggcgacccccgcatcaaggaggagttcaacccggacagtttcctctgtgccgacgactacccggacaacgatgccctgattgccgccattgaggccatcgacgccgacgacgagctttacctgcgctattgccgggcgcccatcctgacccccggctgccgggcggagcgctacaccgacggcaaggcctgctttgattttctggacgccattttctccaaaggtcccgagagcgccctctgccgcaaccgcagctgctggggcggcatttatgagaacgacctgcgctactaccgggacctggccgaacaggcaaagcaccccaagggcctgctggcccggctgggctttggccggtaaggagttttccccggccggctgaacttttttggtctgtcaaaagtgtttttggcttttgccgccgtcccaaaaggcggcgcattgctccgggatacgaaagaaccgcgcagcatgccgggaagttttccacgggaatgtggaaaattccccgggttttgccgcttttttcaccgtccgttccttttctcacgattttttggtgataccatgcccgataccgaagtttattacatccatcccatcgcccacatccagagcgactttgccgagaagttcggcattccccgccagagcggtctggtggacggcctggaagcccgggtggtgttcactcccgactaccgggtggccgaggccctgcggggcatcgagcagtacagccatctgtggctggtgtggcagttttcccaagcagcgggacggccctggcggcccaccgtccgcccgccccggctggggggcaacgtgcgcatgggggtgtttgccacccgcagtccctgccgtcccaatgccctggggctttcctgcgtgcgcctggtaggggtggagtgggacgcccccgacggccccgccctgcgggtggcgggggccgacctgctggacggcacccccatctatgacgtcaagccctacctgccctatgtggacagccaccccgacgcggtggggggcttttccgacgtcaccgcccaccggacactgacggtggactttccccagcccctgctggacaaggtcccggaagaaaagcgggatgccctgcggggcgtactggcccaggacccccgcccggcctaccagcacgaccccggccgggtctacggcatggcctttgccgggctgaccgttcgctttacggtggacgacgatccggacaaaatgcagctcaccgtggtggccgtggaatgagtggaattactcttttggatgcagttttgtctcgttgatcctgcctgtcacacgctgccgggtgtttggcggtattttcgccggatactgcccggtttccatgcgaaaatcttggaaagttttccacattcggagggtcggttgtggaaaatttgttttccccggtgaggcagactttcccgaccagccccggcgcaggcctggcccgccccgccggtttccacctttttcttgattttgattattgaacaggaggttttacccatgacccatcatatcgttatgtggaagttcaaacccgagatcgccgacgctgacaagccccgtctgctggccgacatggccgagcatctggagggtctggtgggccaggtccccggcctggtggagctgcactttgtggccgcgcccctggcttccagcacccacgacatggctctggtttccgtgctggaaaagccggaggacgtggcggtctacggttcccatcccgcccatgtcaaggtggccgatacctacgtccgcccctttgtctgcgaccgcgcctgtctggactattgatacggaacattactccttaaatccatctgcctgacccggtcggtttttcacaaatccggcaggcaaaaaataaaaaagcccggaagttttccacaacctcgtggaaaacttccgggcttttctttctgttatcttttgtcgggggttcagccttccccgttggcacggcggaggatggcatccagctcttccggggggagggcatagcggacgggttcgggggcggctgtgccgtcccgcaggggcagcacccagtaatccagccccagccactgaccgaacttgtacccggtgcggggttcccggccgtagcgggtaaagcccatggccttgtggaaagccgccgacgccgggttggggtcggccaccagggcgatggcgttccagtagcccttggctttcaggatctccagcacggcggtgtacagccgttttcccacccccaggctcaggcggtgggggtcacagtagacggtggtctcggcatcccaggcaaaggcctcccgggtgtgccagggatgggcgcaggcgtagcccgccagctttcccgctccgtccaccgccaccacaaaggcggccttttccagggcaaggcaaaggtccgcacgggtctcctccaccgaggggcagacgtactggtaagtggccgtgctgtggcccacataccagccgtacagttcattgatggcttccgcgtcctccggggcggccgggcggatggtgattttgttttccaccgcccaggccgcggccagggcttccttttccgccttggacagctttttcagggccgcttcccggcgcatggcggcggatttatcggcacagcgctgggcataggccagggtgccgcccccgtgggcgcgggtgtagcgggcgccgtgtccgccgccgttatgggcgcgcagacgccgggccaggtcgttggtccatcccgagtagagactgccgtcggcgcagcgcagcatataggcccaggcaggcgggtccgcgggcaggcggtcggcttcgctgctgggggcagggccggtcatgggggacatcattcgccctccaccgggtagccttctgcccgcagcgcccagcggcaggcttcaatggcctgctccttgtcgtccgccgtcaccagaaagcggctgggatggcagaaccgcagccccaggccggaaatttcccgcagggtctcctccggtttgcccgcccatgcggcggggaagggcaccttgctgcggcgggtgcggtagtcggtgacgcactgggcgctgtatccgccccgctggctgggatagaccacaaacagggcgtcggtcttgtacaggccgtttttccagggcatatagccgggcagcaccacaatgccgtccttggcgtttttataggcgcgctggacggcggcgtcggcacggttgacggcgttggccgcggcgatctcattttccagcaccgccttggcaaaggggacggccttccagaagcaggcgtccgggtcgtcgccggaatcccacaccgggttgaagctgccgatggcatcggacagggaattctgctccccggtgttgtcgttcaggtccaggggctggacaaagttttcatccagcagccgggcctgatgctctcccaccaggcccgggcccagcacccgccacagcaggccgaaagccgcatagggtacaccgttgggccgggtctcccggggttcggaatggtggtcgaacatgccgccgcccacatcgtacacgatgccgtcaaagttgtcgggtacggtaaagccgcgggtaatcttgatatccgggcgcaggatctgcaaaagcgccgtggaaaacacgtcgtcggcatggaacttgccgccgtgggtaaagcctctggcaggtattttcatcgtcctgattctccttgttgattcaaaagccgccttgccgaaaggcgtccggggccgggaagttttccacaaagctccggcccaccggggaaaactttcccgcggcggctgttgtgttattatagcatgtcgcggcggcaaagggatatgccggtttgcctttcgcccggcctttctgccgggccggcagggcgcacttctccctttcgtggccgcttcttgcggctattataccatgattgcccgcccgttgccagtttcccggcaggggggaaggggccctgtcccgggcagggttttcccctgggggcagggccgtggtttcggggtccgggccagcgggtccgggggctcccggggcggcaaggacgggggcggaatctcaccccggaaacagggtgaaaacccggcgcttttttgccgttatggggtcaaaatccggcattggacaggtgtcaaaaaaataacgcccttttatatatataatattacatatattatttgtattgtacagcgttttgtgctatactatattcgtattgttatgtgcaaaattccgatatgaagtggggaatacaatggactctttcaacgacgttctggacgcggcaaaggaatactgccgggtccacacggcggacgccgcctatgagtattacatcagcgggctgaaagccgtcagctttgaaaattccaactgcgtcaccctctcggtacgcaacgactttatccgccagatcgtctccgaccggtacaccgcccttttgaaggaagccttcaagtcggtgctgggctttgacatcgaggtgcagttcgtggtgccgcagccggaaccggaaaagcccgccgcgcccgctaccgaggacgagctgccctccggccggtatgacttcacctttgaaaacttcatcaaaggtccttccaaccagtttgcctacgcggcggcacaggcggtggcggccaacccctccggcgcctacaacccgctgttcatctacggcccctccggcctgggcaagacccacctgctcaacgccatcgagatcgagatcaagaaaaaccatcccgatttcaacatcgtctacgtggactgtgaaaagttcaccaacgagatcatcaccgccgtgcgcaccaacaccaccgagcagttccgccagaaataccgggaggcggacgtcctgctcatcgacgatatccagttcatcgccggcaaggaagctacccaggaggagtttttccacaccttcaacacgctgcacaacgccggcaagcagatcgtgctggcctgcgaccgtcccgccaaggagatcaagagcctggaggaacgtctgcgcacccggttcgagtggggcctgaccgccgacatccagccgccggattttgagacccgcgtggccatcgtcaagcgcaaggcggaacttttgaacctggatttgcccgacgacgtggcggaatacatcgccaatcacctgaagcagaacatccgccagctggaaggcgcggtgaaaaagctcaacgcctactacatgctggagggcatcgccccctgcatcggcgtgaccatgaccgccatcaaggataccctgaacgacacccagcccatcccggtcaccatcgagaagatcatcaacgaggtggcccgcacctacaacgtgctgcctgccgacatccggggcaaaaagcgcaacgccaatgtgagcaccgcccgccagatggccatgtacatcatccgggagatcaccggcatgagcatggaagccatcggctccgagttccagcgggaccattccaccgtggtgtacagcctgaaaaccatggaggaaaacatccagcgggaccgccacatcaaggaaacggtggacgacatcatcaaaaacgtccgcacctgatggggtcaaaagggccggttttccggtccaaaacccttaaaaaacagcccgaaaaagggccgttgaaaagtatcaacagtttcaaccgttttttcaacaattaacattggttttccacaatgcgagttgaaagccccggtttttcacagtttcaacattttccccacaaattgtcaaaaacagattcgtgcccgtttttccgcaccgtgaagcggtttcgcccgtttttccacagtttccacggcccctactactactactatcaacgtatctgttttctgcatctgttttgaaagttcctcaaaaaatcaaaagcaacttctcaacaacaggtacaagccaataaaacgggcatcttctcatttgaaaccatcggctgcctgaaaacaggtatcccgatttgatccgacaggagcagacagcttatgaaatttgaatgcgaaaagactcttctgacctccgccattgagggcgtgtcccgtgccatcaccaaccgggcggccatccccgttttggagggcatcctcctcaaggcggagggtttctctctgaccttgaccggctacgatatggaaatggggatcactaccaccattgagtgcaacgttctggtccccggcgagatggtcctggatgccaagctgttcggcagcatggtcagccggatgcccgcgggcaacgtccacgtggaactggacgacaacggcaccgccaccatccggggcggcgtggccgagtttgagatccccgccatgatggccggggagtatcccaccctccccaaccccggcgccgagaataccatgacggtaaaatgctcgatgctgcgtgaaatgattgaaaagaccatctacgcggtgtcccaggacgacaaaaagcccgcccataccggcgagctgttcgttattgagccgggcagcctgaccatcgtggccctggacggctaccgtctggccatcatccagcgggacgtggagtgcacccgcgatatccgcatcatcatcccggccaagaccctgcaggaactcttgaagatcatgggcggggcggacgacgacatcaagatcgacgcaaaccgtcgatatgtcgtctttacgacaaatggctacaccatcatgagccgcctgatcgagggcgagttcctcaattacaagagcgtcatccccgacggcagccgcacccgggtgacggtggagtgcaagcagttcatcaataccattgaacgcgcctccctcatcatcaccgagcgtctgaagaaccccctgcgcatcagcttcgccccggataagatcacggtgcgctgccagactgccctgggcaaggtggtggacgagttcgcccccgaaaaaatggaaggcgacgccgtggagatcggcttcaataaccgctatatgctggaagccctgcgcaactcccgctgtgagcgggtggtgctggagatcaacggcccccttagccccgtcaagatgctgccggaggacggcaaggactttatttacctggtcctgcccgtccgcttcaagaacgagtaacgggggaattggtcaaaatggaaaacattgacaaggaaaatatttccaatacttccactgagacggtgcgcatccacaccgatttcatcaagctggaagcgctgctgaagttctgcggctggtgcgagaccggcggcgaagccaaggagcgcatccaggacggggaagtggccctgaacggcgaagtctgcaccatgcggggcaagaaatgcgtccccggtgatgtggtgacgctggacggccgcagcctgcgcgtggcggagggccgctgatgcgcttaaacagcctgaaggtgacggatttccgcaacctggaatcggcggaactgacgccgtcgcccgttttgacggtgatctgcggcccaaatggccagggcaagaccaatttattggagagcatctggctgttgaccgggggcaagagcttccgcgggtccaaggacgccgagctcatccgccgcggcgcgccctttgcggcgctggaggcggagttcacggcgggggaccgggaccagaccctgcggctcaccgtgggaggcagggacaccaagcgcccgggccgcaccgcgcggctcaacggcgtggaccggggccgggcggccagcgtggcggggactttcaccgccgtggtgttcgaccccaaccatttaagcctggtcaagggcgggccggagggccggcggcggtttctggacgcggcgctgtgccagctgtaccccgggtatctgacggccctgcgccgctatgcccgcacggtggcccagaaaaacgccctgctcaaggcctacgacatcacgccgggggcggggatgatgctggataccttcaatgaggctttgtccgtctgcggcgccgacctgatggcgcggcgggcggcctatctggagcgtctggcccccgcggcggccaacaactaccgggacatttccagcggggcggagacgctctctgtgcggtatcagccctgctgcgaccccgaccccgccgctctggcccgtaagctggaggaagtgcgcggcgccgaactgcgggcgggcttctgcctggcgggaccccaccgggaggatctggagatcgacatcgacggccagtccggccgcatctacggcagccagggccagcagcgcagcgcggtcttgagcctgaaactggcggaagccagcaccgcgggggagatattgggggagcatccggtgatgcttctggacgatgtgctcagcgagctggacgacagccgccaggcttatctcttgacccgcatcgaggacaagcagacgttcgtcaccacctgtgactccgccgcctttgcccgtaccaacggcaagctggtctttgtgcaggggggcaagacctccgagaccccctttgacgggacggcaatccccgccgccatggcagcccgggggacagagaccggagagaccacacaggccggacagaacaaagagggggcgtaaggatgtacctgcacgcaggccgggattttattctgaacacccgggatatcatcggcatctttgatctggataccacctcgccgggacgcatcacccatgagttcctggcccgggcggagaaggagggcgccgtcgtcgacctgtccgacgacctgcccaagagctttatcgtcaccgattttcccatcgacaccgtctatgtgacccagctgtccacgtcggcgctgaaaggccgtgcggaacacttctcggtcaagtgacggcggagggcggcacaatataacagagtacccaggccggaaacggcctttttaccaaaggatagagggaaagcgcggaagaaaaccgcgcaccggcgcacaccccttgtgtcatgcgccggagggcgtggaaccccgtcaggaacgtggtttttgcagactgcgattttgaggatggaactgcgcagaagatcctgctttttttgaagggaaggatggcagccaaatggcaaatgagatcattaccgaaaccaaccgcgagaccgtgaccgatcacgagtacagcggcgcacagatccaggtcctggaaggcctggaggcggtgcgcaagcgcccgggcatgtatatcggttccaccggtccccggggtctgcatcacctggtctacgagatcgtggacaactccatcgacgaagccctggccggttactgcacccatatcgaagtgaccatcaagccgggggacatcattgaagtcagcgacaacggccgcggcatccctgtggacattcagcccaagatgggcatccccgccgtgaccgtcgtctacaccgtgctgcacgccggcggcaagttcggcggcgaggattccggctacaaggtggccggcggcctgcacggcgtgggcgcctcggtggtcaacgccctgtccgagtggctggtggtccgggtgcgccgggacggctttgaatatgagcagaagttcacccgcggcaaggccgacggcgatctgaaaaagatcggctccgccacctccaccggcaccaccgtcaccttcaagcccgaccccctcatgttcaccgagaccacggtgtatgactacgacatcctgctcaagcgcctgcgggaggaatccttcctcaatgccggcgtgcgcatcaccctcaccgacgagcgcgtcaccgaggaaaaccccgaaccccgccgcgagagcatgtgctacgagggcggcatccgcagctttgtgcagtacctgcatgaaaagcgtgacctgacggttctgcatcctcaggtcatctatatcaagggggaggccaacggcgccattgccgaggtggccctgcagtacaacgacagcttcaatgagctgcttctcagctttgccaacaacgtccatacccccgacggcggcacccatgaggaaggcttcaagacggccctgacccgcgtgttcaacgagttcggccgcgccaagggctacctgaaggacaaggacgagaacctttccggcaccgacgtccgcgagggcctcaccgccgtcatcagcgtcaagctgcaggaagcgcagttcgagggccagaccaaggccaagctgggcaacacctatatcaagacgctggtcagccagatggtctactccaagctgaccgaatactttgaagaaaaccccgccgtggccaagacggtgtttgaaaaggccacccaggcggcccgcgcccgcgctgccgccaagaaggcccgtgacctggtccgccgcaagagcgccctggaaaccagccgtatgcccggcaaactggccgactgccgcgaaaaagaccccagcaagaccgaaatctacatcgtcgagggtgattccgccggcggctccgccaagcaggggcgtgactccaacatccaggccatcctgccgctttggggcaagatgctcaacgtggaaaaggcccgtgtggaccgtgtctacggcaacgacaagctcaccccggtcatcaccgctctgggtaccggcatcggggacgagttcgacatctccaaactgcgctatcacaagatcttcatcatggccgatgccgacgtggacggcagccatatctgcaccctgatgctgaccttcttcttccgctatatgcggccgctcatcgagcacggctacgtctacgtggcccagccgccgctgttcaagctgcagaaaggccagaccgtcaagtatgcctacaacgacgacgaaatgaaggctctctccgccgagatgcccggcgccaagatcaaccgctacaaaggccttggtgagatgaaccccgagcagctgtgggagaccaccatgaaccccgacaaccgcgtcatcgtccagatcaccatcgaggacgccgagcgcgccgacgaggctttcaccgtccttatgggcgaccaggtggagccccgcaaacgctttatcgaacagaacgccatctacgccaatctggacgtgtgacggcgctggttcgctgtgcctgtatctgttcgttcttgtgattaacccgattaaggtggtaaacaaatggaagaaaatatcgtgatggtgccggggtccggcacaaaggtcatcgtccgtgacgtcaaggaagagatcgagtcggcctttctggactattccatgtccgttatcgtctcccgcgctctgcccgacgtccgggacggcctgaaaccggtccaccggcgcatcctgtacaccatgcacatccggggcaacgacccccagcatccctaccgcaagtccgccgacaccgtcggcgccgtgctgggctcgttccatccccacggcgacgccagcgtctatgacgccatggtccgtctggcccaggacttcagcctgcggtatccgctggtggacggccagggcaacttcggttccgtggacggcgaccccccggctgcctaccgttataccgaggcccgcatgagcaagatggcctgcgagatgctcaccgacatcgacaaggagaccatcgactgggccctcaactttgacgagaccaaaaaggaacccagcgtcctgcccagccgtttccccaacctgctggtcaacggcagccagggcattgccgtcggcatggccaccaacatcccgccccacaacctgcgggaagtggtcaacggcatgatcgccctcattgacgaccccgacatcgacctgcccggcctgatggagtacgtcaaaggccccgatttccccaccggcggcatcatcatgggccgctccggcatccgtgccgcctacgccaccggccgcggcaagatcaccctgcggggccgggccgagatcgtggagaagaaaaacggccgttttgagatcatcgtcaccgaaatcccctatatggtcaacaaggcccgcctcatcgagtccattgccgactacgtcaaggacaagaagatcgagggcatcagcgacctgaacgatgagtccagccgcaagggcatgcgcatcgtcatcgaggtcaaaaaggacgccaacccccaggtggtgctcaaccagctctaccgctatacccagctgcaggacacggtgggcgtcatcatgctggcgctggacaaaaacgtccccaagatcatgcccctcaagagcatgatgcagaagtatatcgacttccaggacgaggtcgtccgccgtcggacccagttcgacctgaaaaaggcggaggagcgctcccatatcctggaaggcctgaaacgcgccgtggacatcgtggacgaggtcatctacgccatccgtcactgcggcggcggccaggccgaggccaaggcggccattatggagcagttcggctttgacgacgtccaggccgacgccatctgcaagttccccctgggccgcttggccggtctggagatcaagaagatcgaggccgagttggacgagctgcacgccagcatccgggacttcaaggagatcctggccgatgacacccgcgtcaaggccatcctgaaggacgagctcatcgccctgcgggacaagtacggcgacgagcgccgcacctccattgaagccgtctccggcgaagtggacatcgaggacctgatccccgaggagcagtgcgtctataccctgacccacgcgggctatatcaagcgcaccgccgccgatacctacaccgcccagaaccgcggcggccgcggcatcgcgggcctgagccacaaggacgaggactttaccgaggaactgttcgtcggctccacccacgactatatgctcttcatgaccgacaagggccgtgtctaccggctcaagggctaccaggtgccggaaggcgcccgcacctccaagggcaccaacatcgtcaacctgctccagctgcagaacgacgagaaggtcaccaccatgatgcgccagcccgcgggcatcgacgaggaaaacagctatatcaccatggtgacgcggcagggcctgatcaagcgcacgccgctgtcccagttccgcaacatccgcaaggcgggcctgattgccctgagcctgaacgagggcgacgccctgacctggtgccacctgaccggcggcgacgatgaactcattgtagccacccacgacggcatggccatccacttcaccgaggccaacgcccgctccatgggccgtaccggccgcggcgtgcgggccatccgcctggcagagggcgattacgtggtgggcgtctgcgtctgccgtccgggcgccaccatgctcaccgtcaccgagaacggcaagggccgccgcagccgcattgacgactaccgcatcacccgccgcggcggcaagggcatccgcaactatgcccacggcggcgtggcatcggtcaagatcgtggacgagaccgacgacctcatcctcatcagccaggaaggcatcatcatccgcatgcacgccgacgacatcaacgtccagagccgctacggcagcggcgtccgggtcatgcgcctggacgaggccgaccgcctggtgatggtggcccgcgtggaccgcgacaacggcgccgagaccgccaagccggaggaggaaggggaaagcgaggagctttccgccgaggagatcgcccgcatggaggcggaggacgccgccgccgatgaaggcgccaacgaacccgatcccgacgacgccgaataatgcggtaagggaaacgccggataccccctgaacgggggattacctccgcgccggggctttgcccggagcagaagggccaaaggcccgcgcccaaaaggccgggacccccgccggtgataccgcacccccgggctgtgacccgtggggcgcagcccctgccgcaaaacccttaaaaatttcaaaggcagacttccccgcgtttttgccaaaacaggcagcgcggggaagtttttttcttttgacggcccaaaaagagggtgtctttccgttatttggtaaaatccgtgtcaaaatcaatcaaaaacacataaaatgtgaaaaaaatatagcaaatcaaaccaataaaccattgcaattttcacaattgtgtactatactttagataccaaccaaaaaagaaaagccgtcctttggcgtccggaacggattcgggcggatggacggaaataaaggaggtaatcaaggtatgaagaaactgatttcgctgctgctgacattggggcttattgcagccttggccgtccctgtattggccgagaaccccgtccaggccgcggcggatgcccgtgaggcagcctatgccgctgcagtggctgactatcaggcacagatcgccgccaaagaggatgcgtacatcaaagccgttggcgcatatgtggtgcaggcaaaggcaaaagccgatgcggacgctgccgccattatcgctgccggcaaggccgcgcataacgctcagctggcccagaacgatgcgattgtagctgcgggtaaggccgctcacaatgcgcagctggccgaaaatgaagcctatctgggtgctatcaaggtgttccaggcgcagatcgccgccaaggagcaggcataccttgacgccgtcaatgcctacgtagcacagtccaaggcgaaggctgacgcagacgccgccgctatcatcgcagccggcaaggccgcccataacgctcagctggcccagaacgccgccatcgaggcacagggcaaggctctgcaggccgccgccgatgcacgcaatgacgcatacctcaattccatccgcgcctatcaggcacagattgccgcgcaggaagccgcctacctggcagccctgggactgtaacggtctgatctgacggaaaattatttgtaagcctcacggccgcccgccaaatggtgggcggccttttttgtatttttttgattttgccagaaaaaaccgcaaaaatccgccggaaaaggctcaaaaaggggttgacacaggggacaagtttgaatataataataaagcacctttcgttggtgcatacaatttatggcggtatagctcagttggctagagcattcggttcatacccgaagtgtcaccggttcaaatccagttaccgctaccatcatacaagatttcgctaaaatacttgggggccggctgcaatcgtggccggggagtagcttgctgttttagcgaaatcttgtattataaggcccgttggtcaagcggttaagacacggccctttcacggctgtaacatgggttcgattcccgtacgggtcaccaagaatagcctcatatttttaacgcgttgtcgttgaaaatgtggggctttttcctttgcatagcatagcataccacaatcataccacacttggcagaaaaggacaagtaaaaagacttccgtttgtccggcgcgaaagagtaaacccttgttcatcgagcatcaaggggctttcgcggcatatcctcgctgcgctgcggtattccacggtccccttgacactcgctgcccaagggtttcgggagcaatcgcggacgaaacgaaaattttaagcgcccggcttagaatttgagattttggaaagcgaggaaccgaacatgaaagagaccgtcaagacctcccgtaccgctggctacctggaaaaaatcttccgcgccctcaatgcgaaatattttgacaaccagctggaagaacctgtcatcacgatacaaagcaccccgcgggcctacggccatgtgactgtcgccagggcgtggaaccggggcgacagcacccgccacgaactgaacatcggggcgggaacgctcgaccggcccatcgagaacgtggtcgccacgatgctgcacgaatgtgtccacctgtggaacatgcagcagggcatcaaggacaccagccgcggcggggcgtaccacaacaagaagttccgcgacgcggcggtcgcgcgcgatctggacatccggcacgacccgcgcatcgggtggagcatcacccagccgacagacgccctttgtgagttcatcttagatcagggctggaccgatatccagatgaaccgcattgagtggagcttcaccccgcggggggctggcagcggaagtgcagcgggcggcgaggcaggaaccgcaccaaccaccaacggaaacagccaccaccgcaagtatatctgcccctgttgcgggaacagcgtaagagcgacaaaagcggtgaacatcctttgcatggattgtggtaaacagatggttgtacaacaataaagcaagccggaagcagatgcttccggcttttgtcatgtgcacatcaaaaaactcaattgtcaagaaaagaggacggtgcagaccattcggctgcgccgtccccgttttcttttccaaggctaaatgtgaataggaaccgtcccctattttttcaaacgcatggattataccataccaaggattgtcaggcattgaggttcggcggcgtagaagataaagtgaatggggacggctcctgttaacctaaataggaaccgtcccctattcttttccccccattcacctttagtttaccccttagtgcctaaagtgttatcatcgccattagaagggtcctgcgtccagtcatgactttcgcttacagaccagctgccattttgatcgtcaaaaccactcgacccaaccggaggatcattggacggagcggaagagctgccggaatcaccggacggagcagaggaaccaccagaggcggcagcctgctgttgctgctgggcagcctgagccgctgcctgctgctgggccgcggcctgagcggcggcctgctgagctgccttctgatcggctgccttcaccgggcaggaagaactggtgtggcccgtagctccacagtagctgcacttgatattctgaacagtcagcgaataggtttcactaacatccccaacggaagcggtaatcgttgcgcttccagcggccttagccgcgacatttccagaaccatcaacagtagcaacactctcatcggaagaagtccaggtcagcatctgatcgcttgcgttctccgggttgaccgtggccttaatctgatgtgtgttccccaccgtcagcacgccctcggtcttgtcaaagctgatgctttcaactgccgtggtgacggtcacatgcgtggtggcggtcaggttaatgggctgggaggaggtttccgccgttgcggtctcgcctgtagcaaccgggaaggtctgggtcagggtgatggtgatgtccgcttcgccgttggctaccgccgtgaccaggccggtctcgtccaccgtggccaccgtttcatcgctggaagtgtacatcagtgtcacatcagttgcatcctccggtgttgcctcggcacccaactgagcggtattctcgccgttcatcacgagttccagcttatcgggaaccgtgattcccgttgcaggaaccacaaccgtcaccatgcacgaactgctgagattcacgtcagacgcgctgaccttgatttcggccgtgcccgcaccaacagcggtcacaaggccatccccatcgacagtagctactgcctcatcgctggaagtccagaccagatccagcttctcagcggccttggtaatcgcctcggcttcggcctcgttcttggtaccgtaatcaacttccatctgaagcgtctctcccttgttcagcacttcactgggaggcaaaccaacggaagtgatgtctacgccgcaggcgctcatccccaccgccattgccgctgcgcagatcagtgcggcaactcgacttcgaatgttcttcatacatgatctccttttttcatcccggccgcaggtcttggtgaggccctgcggccttgatttttaaccgtttaggctggggacggggccgaccgctgcgcggcagacccgtccccgagctgcttgttgtatggcttcattatacaacttgcgcatgttcttttcaacaaaaacgtgcttataggtacgattttttgacctgcaaaagcatacactaatactaattcgtacacagatgcacgctttcagggagaaccgggagaacatgcttttacaggacgccatcaaaaacagaatcttggaactggcggcaagtcgaaaatggtcgatcaacaagctggcggaacggtcaggaatcgcccccagcgttttgaaacgtactgtaaagccctacgccactgttaaaaacacatctaccgaattgattgcacgcctgtgcatcggtcttgaaattccattcaaagagttttggaacagcccactgtttgacgatatagaaaccagacaacaaaaagaggacgagagcagccgttaaatgctttcgtcctcttttttgaatgtatacacacaaaatcagctttacccgccaatcaaaaagcgcttgatctcaccgcgggcgatgccggttaagcgggagagttgcgcgatggaagcaccttcttcgcagtacaggccatggaacagattttccatcttgttttccggcaaggagttaacagccataggagtgcaacctgccagtgcctggataagatgaatgacttcttcatctttcagccgctgatgggtacggggttgatcgatatcgcagattcccttggaattgagttcctgctgttcatgccattcccgcagccaattcagcggacgcagctgcagagcatactctgtatggacccgacagagaacagttcggcgttcgccaaagtagtcttgatagctgctgtacggatagtctgctggattctcgaccatgcccgcggcaaccgggttattgtggatgtagcgaagaacgcgaagaaaatacccaactgtcgccacgggctgactgacaaagcgtccttgaaacagcgtgccgacccgttgatattttgaattaaaaaagttgacatatcgaacgcccagggatttcatggcgacttccatctggtcggtcttgtctttgtctgttttggcaagtaaatgcacatggtttcccatcaggcagtatccgagaatttcaaaattttcattttgaacaaaatccagaatcgctaaaaaatgcaggttgtcatctgtggaaggaaaaatctgcatcttgtcaatgccgcggaccatgatatgatacacaccgctgggggacagctgccgtgccttacggggcatggtcggcaccttcttccagctcatcttttttatagagaagcagttgaatcaggcgggaagcatccccgcgggtcatctttttggcatcgattttgtaatcgggggccaggcgatggatcagggcatactgctgatttgtgatgggctgatggtcccacacatgacgacttgacttgtcccagatgtgccggtcgtgcggatggttcttctgcaggtcctggaacacatagtcaaacacaaactgcggtggcaccgcgtttttggaacattttttgtttttgcggagatacacgtttcccgcatcatccggcgcagaaacccgataaaccatgttgggaatgggcaggatatagccgccgtttttcagttccacccatgccacatcgtgcaagtccacgcctttgcctttatccaaaatgctcacctcctgctgtttttcaatccaggtttcaggaatttcttctccgctcaaaacttcgactttgtcctcatccggctgcttttcctcggccgatttgacttcggcgggcttttcttccggcagcggtttgccgatcagggtggccgcggtacaaacgggatagtccgatatgcctacacaatcaatgaccagtgcggtggctttgccagggtagagccgtagagcgcggcctaccatctgagcatacagtcccacattggtgtgggaaatcgggcgggcgatgatgacggtttcagtactgggcaggtcagtaccctcggtcagcacgccgaaattgaccaatactttgataatgccgagccggtatgcttccagaatacggtcccggttcctggtgctgccaagaatcagcccggccacctttttgcctgcatacttgttaagcatatcggtaatatcgcgggcctcatcagtggaggcagcgaagatgatggtttgaccgcgggcgtgcttttcataggcttctaccacaccagcggcggtaccggacataacaagggccacgtcggattggtcaaaatcgccgtattcgttgattttgacgctgcccatcttgtatttgagctggacttgaacacagtccatcggagtcagatagccgtgttcgatgccccaaagggtatcatactcacacagcaggtcatcaaatacacaatccaggccgataccatcgccccggtgtgccgtggcagtgaagccgaaaatgcgggcggcaggaaagtaatccagaaccttgcgataagtgggcgcggcggcatggtgggcttcatcaacgatgattgtatcaatctcgcggggattgtacctgtccaaccgtccgacaagactctgcacggaggcacttataatgggttgcccgcgggcatggtgctgggccagttcaatgccacacggaagatcggttaaataggtcaggggctgccggaccagttcttcacggtgcgataaaatcaggcaatgatgatcgctttcggttatgtccttgcggataaattctgtgaaaataagcgtttttcccagaccagtgccgagaacaccgagagcggcgcgcccgtcataatccaccattttgtcaatggtttggatttggtaatcgcggagcgccagcggcgggctggcgcgagggaggatagcatgggtgtagttcttcataattccgccctcttaaaacgacagttcgtcatcattgtcttttccttttttgtcatcaaaaaaataggcttgaataatcttgtcaccgctgccatctcggacgatgaaccggcccggtatggcaggcagcttcgcgccgctaccatcatccaagatgacgatggagctttgcgcgtcagcgcaatgaccacagatgcgaccgtccagctgggctttaagcgcccccggcacactggcgacatcggggcgctgtgtggccacaatcaagtggatgcccatggcacggcccagacgcccgatggtaagcagatgattcaagatctctgcaatctcagccttttcttctttggcacggcctgttgtatcaaggatcatcgaggtttcgtctaaaatcacaacaattctttttaatggggaatgactttcattgtacccatcaatattggggcatttggccttaatcaaggcatcgcggcgggtatacaggatggcgaccacttcatccagcatctcagccagagtttggaggtcggcggcataatggccttccgcaaattcatccgcgttaaagtcgactcccttgtagtcggcgagataaaggatgtacccggccatctgcatttgatgaagtagcagtttcaacagttttgttttgccgccgcccgtcgctgcaccgatcaaccaatgtggaattttagacagattgataatcaggggaatgccagcggcgttgacgcccagagcaagttcggcagaatcatttggacgcaatgcatcaagccagggcactagatgatcaaatgcaccggaagccttgacggcttcaatctcaatggtttgattatcgaaaccaagatggatctccagaatactgagattgagtgcgctttcaatgagcacctgatcttcctgccagagatccagcggatagcctttaatttgaaataccaacttcacaatgccatgatcaccgttctggcgggcgatcaacagcggcgcctccccggcgtagttgacaattccggcgcgggtgaggtcgtcatagatggcccaactacccgggatatagccacatgcggggaccgtgaacaggcagagaatgagccagatggcggtcaaggcagcattcaaaagttttggaatcaaatgccacaaaggattgtccggggccgggcgcatcaacaccagcaccgccagcgtgatgatggcaaccatgaccaggtacctcttccggcatcccgggtcggtgatgattcccaccgccccgcgacgggccatggccagaatgtagcgccggagcgtctgctgacgcagcagatatttttcgttttccatgcaggacctcctgttaatctaaatagtccgagggaagaccttcgggcttgtattcaagtcccaggtcctcacaaagttccttgactttggcggcatcgtcttcggtactggcttccttgggaaacatggaagcaacggggttggtacctgagccaacgagcatatattcttgtatctgctgatggtatgcatatatgctcattgtctgctgcgttagcagtatcatcgttttgcaacgcctctcgaactgggcgatgggctcaccgacgtcccagatcaaacggaagaattcatcaattgttaaaacagtcgtaatgatgatacactgaacctccagccagcggtcgtggtagcgcgagttgacagaagacgcggtgttgttgtccaacattttcaaaagatctgacaaatcaaatgttttgggtctcaggtcgtccagaatcaagcagtcctgaccgttgtagtcttggacagggtcacggctgctgcctgatacacaataactcaaagcacgtttatcacagatatactttgctaaagttgttttgccagaccccgcttcccccgttatgtagataacgtcgagtttgcggtttacgtctttttttaacatgccttcgcggtacgcgaacgcatattcaaattctgttttgtgatcgaggtacatttgcattgtaatgtggttataaagattgtaacgacggatgctgccgtcctcaatcccttccagaattttgcggaagcttttccactccgcttgcttcatttcgctttttgtgcgaaccgcaatccagtcatagcccggtttggcaactacttctgagtcgttgtactggtgcttctcgggggcatttcggtgcgtcaaataagccaaagctccgccgacatcagaaacagtatatttcccacgtttgatcttttgcttgatgatgttaacatattgcgatggaacaccgatataattccctatggtggaaaaattccggctgtctatcaattcgatgacaagatgtatatgtggctctttttgctttccgttttcatcgacatctttgtcgtgcaagatataagcccactttttgatgttgggttccgcttcaaggtttgcttcgagcgttttgtgccagtggtcagggtaccctggaaggtatttgatttgctggacgatttcacattttcgtacggacataagctattctttacttgacttgccacatttctgccacaatcccctaatttacaacctcatcgggacaagcccccgatgaggtgggaatcttagattttgacggaaaaacgtcaattataacaacaaggtgttgccgctgacctgccacatcaccatataactatgtagtcattgtggcgatgtggcaggtgtggcaactgtggcagatactgtcaatcaatcgacggggacgatgctgtccacgcgaccataacggttgtaatacactttgacttcgcagttcagcagatcggcaagattgataccctctttggccagcttggcatcggacagatactgccgttcaacggagacaccagccccgcggcgggggtcaatctcggtggcgatgtagatattgtaacctgtaatctgattgccctcgggggccttaaaatcattgcgtcgataaccgataattttcattgttaaatcctccaaaaatttgtttaatcaccaggcaggcgcctacctgatgatcctattgtggcattctcgatgttgtaattcacactacaattttttattgtttgatgttgcaaagtaattataatgaaatcaaaaataaaggagatgaatctcatgtactttttacgtgtcaatgatcaaaagtgcgagctgtacaatcaacaagagcagttacttttacaatatgaaaaaggtgaagtgacggaaaaggtatataatgctttgaatgacaagactttgcgagttttggatcaaaaggttattgctatacccggtttataccgaggtacagatgcggggagcgggcggactcagctatactctatttcagatgttgactacctctcgcgtgtgcgccgtcaatcgcccttcatgcggcaggtgcttgccattttcagactttcaactcccacgctcaaaatggtgtacatgcagatcctgcacagcttttatcagaaaatacctttggaagataacaatttaatgtatacaatcaaatacaccgatgatgctcagctgattgaagaaaaatacgaatacggaacaaaacctgatatcatcaatattgaagactttacggcattgatcggttacgatttccaatttttagtagggttttctacctgtaaacgctgtaaacgcctgtttaggcccaaaaaaaacgaatccttttgctcagaaacatgcaggatcgagtcatctcggcatcggtctggctggtgcgattctcaaatagaggtcaaaaagaaaattgacatggagctcaggttgattgatgatcaaatcgatttattaaaagcgcagaataacgagaaaaattcagagcttttggctgagttggaaaaaacgaaagaattatacaacaacgtctataatacctggatggaatggaccaaaggcggtgttaaatcgaactctgccaaaagttatcttcttgaaaaagggcagggattgaccatttattacacagaatacctgttaaattggtgggaccacttttgtgcggttgcccaaatggatctatctgattatccgctataataaaaaagaacagggccacaacatggtggccctgttgcttattttggggcccctttttcaatttggcgggtcaggttttgatcgagcagttcagcaaccccttctaggtcgtcttctagggcgtgggcatatacgcctaaagaaatacctgcatgagcatggcccattagtacatccagaatccacaagggaatcaacttgttgatactggcgaaggtgtgccggatttcatagggggtcacataaggaatcccgttcgtctgacaatacacattccagcgatcgcggtaacaaattgaagtcaactcaccaaaaactctctcgttgggattgttgggattatggcggtattgcttctgttgattcagaagatctcgtgcaattttggttaaaggcagatcacgttgcgcaaaatcatttttcccggttgtttcacgccctttggccgtgatggagcggcggatatgaatacaatcagcatcgatgtccccccattgaagccccatcagctctcccgggcggaggccgtaaagaagttggaaacggtatgcatagatccagtaatccttgtagatggcaccttcatacaaagtggtgtcgacatgaaaaagcgtatagatgtcacaggcacgcaggacatttttcggctttgtctttgaggatgccggaattttggcccgcttggtggacaagtccatgcggatttctgaatcatagagccatccgcaaaaagcggacaagtcaccgcggatattcatcaccgtctttttgctcaaccctttcgaggcagcggttgtgataacccgtttaaggtcctggttcgacagttgaccgattttaatggagccgataaccgggcggatatggtttttataacggttctgaattgtgtatatgttgaccgtttccagtgccttgtcttgcaggaacctctgaaaaagggtatgtacaagggtggtttccagtacatccagcgaggtatcttgcatacgccaatccagcgccttttgagcacattctttgcgaccagcatcgccttctttttttgagtaaaaagatttcttgacgccattaacttggacgtttaacttccaatacttaccatgccgccgcgcacgacttgcatacaatttttttaaagacttaccaccaatatcgctcataatgtattcctcatttccgtacttctatcggcaagatgaaacaggggtagtaatcgttggctgaaaaagataaaacctttcctatcgccgctgcttcttccactgtgaaagatgattttccctgcatttttgcactcatagccgacgccgaaataccaattttttttgcaatgctttggcaggtttcgccgcaagaatagattctgcctgtaagttccgggtacatccggcgcatggcaaacacctcttttttgtatttgccaacattatatttgtgttgattttgtaaatcacactacaatatcaaaataccacatcccataccaataacgctttttgtgtaaaaaaaagaccttacagcataacgaaaaaatttcgttataatgcaaagtcttggcgaaatcacacaaacgcaggtagattcgattcccgtacgggtcacgccccggccacgggcttttttgcaggccgtggaacatatccgcagcttccgtacgaggaattgctgcgcaggcgaccgccgcctgcggcggaaacagggagccggagccgcggctcgtgacagggcggcgtgcgggagattctgtaagagtcatcaaacaaaaaccaccgaaatctgatgttttgaaatcagatttcggtggtttttcttttgccttcacgttacatacctcagttttacctcactttctgttccaggtaaatgacgctgataaaaagtgatcctcacttggcaatggacgaatcaatgctgtctcttgtccgagcgaagatactcggaaagttcgactgcaagttcggaatgataggtcagggtcttgtcgccggccatcaggatcataaagacaggccacagaaaggtcatgcccaactgaatcgtctgcggagccttgaagatcttgctcagccggttcatggtaactgcgttgcagataaacccgaatccgatgattccgatcagggcagtgatccagtcaacccacgagctgaacgacatcctcagcatcaaaacccagtaatagaacataagcgacacgaccacgccgtagcggccattccgccagactttctggtaaatgagatagtcgctgtataccgggacaatggaccagaaccccatgatccccatgcgctcaaaaatcttccacttgccccagatggacaaaattccataacagtagaacagcgtaaccaataaataatccataagagcctcctttttctctgaagaacggggaaaggcaggatatccggctgcgccgtccccgggtctggtttccatggactgtgaatgaaaaccgttatttattttccggtcaacggactacaccaccgctgccggcatcattttcggtccagtctacggacggctgagagctctggtaatcgtcggggttgaggtcgggggcggaagaccccccgctctcctggacagcctgtttctgctgggcctgctgctgggctgcctgctctgccgcagcctgtgcggcagcagccgcggcggcctggtctgcggccttggtggggcagttggaactggtgtggccggtcttgccgcagtagctgcacttgacgttctgcaccgtcagctggtactgggcgctcacctccccgcaggatgcggtgataacggcgctgccctcctttttggccgtgaccttgccgttctcgtccacagtagcgacgctctcgtcgctggaggtccaggtcagggtctggtcggtggcggtgtcgggcaggaccgcagccttgatcttgtgggtgctgcccaccgtcagcaggccctcggtcttgtccagctcaatgcgctccgccgccgtggtgacggtcacgtgggtggtggcggtcagagtaatgggctggcgggcgctttccgccgtggcagtctcccccgttgcaaccgggaaagcctgggtcagggtcacggtgatgtccgcttccccgttggccactgcggtgaccaggccggtctcatccacggtggcgacgctctcatcgctggaggtataggtaaaggtcacgccggtggcgtcctccggggtggccatggcgttcaggtttgcggtgttctggccgttgagcaccaggtccagcgtgtcggggagcacaaggtcccgggcggtgaccaccacggtcaccacgcagctgccggaaagctccccatcccgggcgctgacccggatggtggtctcccctgctcccacggcggtgaccaggccgttttcgtccacggcggccaccgtctcgtcgtcggaggtccagaccagttccagcttttcggcggcctcggccagagcgtcggcatcggtctgggtctcggtgtcgtactgcaggtccatctgcagggtctcgcccttttccagcacggcgccggcgggcagggaaagcccggtaatttttgccccgcaggcggtcagccccaggaccatagcagccgcacacagcagagctgccagacggctggaaaacttcgttttcacgttgtttctccttcttttttcgtgggcggcagggaggatactgccgcgggtttgtatatcagggatgcgggaaaggcaggctatccggctgtgccgtccccgttttctatgaatagaaaccgtccccaaggtcttagaaattgtgaggctgtccataaaaatgagcggaaattgtatctatgcatttataagcaggaacattattagcagcgtccttcgcaggtgctgttatcgcccgcatgggaattatcctgggtccagtcggtgccggaggacatcccgaaaccggcatcccagtcgcctttgacgcccgcctggtcgttactcatgttggacgggtccttcgtccagtctgtgccggagccgggggtggcgttcgggtcgatgacgtaaccactgtcaccgccggaagaattcccgctctcctgggcagcctgttcctgctgggcctgctgttgggccgcctgctgggccgcagcctgtgcggcggcagccgcggcggcttcgtcagcggccttggtggggcagttggaactggtgtggccggtcttgccgcagtagctgcacttgacgttctgcaccgtcagctggtactgggcactcacgtccccgcaggatgcggtaatgacggcgctgcctgcctttttggccgtgaccttgccgttcttgtccacggtagccaccccctcgtcgctggaggtccaggtcagggtctggtcggtggcggtgtcgggcaggacggcggccttgatcttgtgggtgctgcccaccgtcagtacgccctcggtcttgtccagctcgatgcgttccgccgccgtggtgacggtcacgtgggtggtggcggtcagggtgaccggctggcgggcggtttccgccgtggcggtctcccccgttgcaaccgggaaagcctgggtcagggtcacggtgatgtccgcttccccgttggctactgccgtgacaaggccgttctcgtccacggtggcgacggtctcatcgctggaggtataggtaaaggtcacgccggtggcgtcctccggagtggcggcggcgttcaggtttgcggtattctggccgttgagcaccagttctagtgtgtcggggacaacaaggtcccgggcagagactaccacggtcaccacacagctgccggaaagctccccctcccgggcgctgacccggatggtggtctcccctgcgcccacggcggtgaccaggccgttttcatccacgacggccaccgtcttgtcgtcggaggtccagaccagttccagcttttcggcggcctcggccagagcgtcggcgtcggtctgggtctcggtgtcgtactgcaggtccatctgcagggtctcgcccttttccagcacggcgccggcgggcagggaaagcccggtgatctttgccccgcaggcggtcagccccaggaccatgactgctgcacacagcagagcaatcagacggctcatagaaattcttttcatgtcgcatctccttttgtctctttctatatagggtcacaaaattcgtttcttcacgtggttgatccaaaaaatttcaatttttttatttccgccgcagacggccggtcaaggacgggccgcaagcgccgccgtacagcggaaattttgccgttcggaagaaagccgggggcgcggtatcagcggaacaccacgcggcggatatgccgggaaatgccggcgggctgttcccgggcggagcaatgcaccgaggagatgcacaccccggaggagatcaccagcatcaggtgcagccagcccttccccggcaggccggcggccgacgcggggagggtgatgagcaaacgaagggatttgcgccgggtcctgccctggcggaaactgagggtcagcaggcacagcggcctgtacagtgtgcggcagtggtaaagccaccgccaggcggcgtattcgatcacatgggggtcaaggtcaaggccgccggtgtcaatgacggtcttttcggtggtggaaacgaaacaaccaaggtttccgtattcaatttttttgatcatgggacatgtcctccttttcagggtgcaaaataaaaaacggcataatgatcccgtagatcattatgccgttcgttaaatcattcagttttgcgctccctgaaaaggagtaaacgtattatacagccataaaatccaaaaagcaagaggtttttcaaaaaaatcctgccccggtttccgctgaggtgccgggcaatttgctccaagtacctgtggcgcttgctgcggatgcgttttttggggtcacggatggctcacaaatcgctgtaccgcagcaggaggacgtcgtgctcttccagccaggtgcgcatggcggggtcacagagcatctccacctctttggtgcggttgaccgtcaggctggacgaccgcaggagaaaggcgtccagataccccggatggcagacaaaaatgttgggcatatcggtgcgggcatggagcaccgcctctttcagttcccgggcggggtcgtagtcggggtccatgctgcgcatgggacaggccgccaccggtttcccgccaaaggtccccgtctcgtccccgggatacatgttgttgtatttcaggccgtggcgctgggccacgatctccagcccctgcatgaggtgcttgctcaaaacggcgtgtccctcaaagtaatccggctggcggccggtcagctccacaaaacgctggtactgggcttcaatctccagcaccatctcatccagcacggtgaagcactccccttttttccaggcttcccggtaggcgcggctgcttttcagcatgccgttttcgtccagcaggctgggaatggaagccgggtcggcacagggacggccaatgcagatgttggtgtgctggccgatgcagacgccggtgccttccagcagggccagaccgtgggcggcggcgggcatgttgggcatcaggcccacgctgccgatcagaccttgtttgacggtcttttcaatgccgtagttaacggcttcgctgtaacccacgtcgtcggcgcggatgatgaaatcgatcataaggaaaaacctcctgtagatggataagaacaggaaagaccctgcggtcccctgtcagggcggaccgcaaggttttccaaagcaaacgcgggagatgtcttatttggtgacggcggcgggtttcttttcgcggcagagcagataggtagccactgcggcgaccacgatggcaatgatgccggaaatgatgccgttgatgatgttggcgccgctgccgccggtgtaggcggtgagggccaggaagttggcaacggggacggagacgtacgccttgacgcccatcaggccggcatacagaccgcccgcggcgccgccgatggccatgccgatgaagggctttttgtacttgatgcccacgccgtacaggccgggctcggtaacgccaccgatgatggcagccacggtgtagctgaagctgagggtcttttcttccttgtcacgcagggcaagggccatgcccaggcacatgccggtgacggccatgctggcggagacagcgcccagggagacgacagggtcgtagccgttggtggcgaagagctggatcatctgggcgatgaggacatggtgcatgccggtcatgaccaggaactcccacagagcgccgatgaccgccgcgccgatgaagccgaagttggtgccgaaccagatgacgccctggcagatgtaggtgcccaggaagccgccgatggggccgcagacgcacagggcaatgggcagcatgatggcggtggtgagggcggggaccagcatgattttgagagcgtcaggaatgtaggtcttgaggaagcgctccacgtagctcatgacccagacggtgagcaggatgggcaggatggtgctgctgtaattctgcacggcgcagggaatgccgtaaacggtgaaggaggtaccctcggcggccatgttcacaaaggtggggtgcagcatgatggcgcccatgaagatgcccagcaccgggctggcgttcagctttttggcggcggtgtagccgatgagcagcgggaagaagtagtaaccggcgtcacccacaaaggtgaacagggtgtacaggtcgctttccggctggaggatgcccagcatatcggggccgaacaccgccacgatgctcttgaagatggcggcggccaggaccacgggaatgatgggggtcaggctgccggacaggtaggccatgatgttggagccgatctttttgggggtgaggggttccttgaccttgtccaggttttcgtcgatgccggcggcgggggtcaggccgcactcggagcagagggcctggtagaccttgtccacgttggtgccgatgatgacctggtactggccgccgctgcgggccacgcccatgacgcccttgatggccttgacggcgtcgtcgttggggatgctctcgtccttgaggttgaagcgcagacgggtcatgcagtgtgctgctgcggtgacgttgtccttgccgccgacggcctgcaaaacgtcggctgcgatctggctgttgctgattgccatagtgggattcctccgttttttgtggtggtggaccgggggttatggccccggtcggaatgtatcttgacggcggcgcgcgcccgccgttcagactggtgaaagtgggaaaaaaggaataaaaaagacctccgtccccgcacaggcgcaaaacgtcctttgcgggcatcggaggtcatgccccgcctgaaacgggttacattccttctttgatgcagatccggtttacatgaaggatcagatataatttttcttcctcggtcagttcgcagttccagacttcccggatgtggtcggcaatgcgctccacacagcgggcgatgtcgggaaactcttcccgcaggcttttgtacagctgcaaattgtcgctgttgatggccttgcccgcatggatgcgcccgaacaggtattgcagatgggtggcatagcgggaatagttgaagctggtgcggtcaaccaggatgtggaagtggttttctacaatgtcggtgatgtcctccagcatttcctcgtcccccacggtgtcgggggcggagggctcctgatgaggggtcatccggttgttgatgaggttcatggcgataccggcggcctcgctctcggggagagtgatgaggaactccttgcggatgcgccggagggtgtgccggccgatgcggtattcaatgggatacatctgctccacatcgtaggccaggggcattttgacccggatatgcttgcgggcgcgctccatggcgaaattgatgtggtcggccagggtaaagacggtgttggggttgagctggtaggaaagctcgttgcgggcaatgtccacgatgcgggcggaaaaatccagcacggcggagggcagatccgtcaaaagaggctggtacttgtcgtccacgtcgtagaaggtacgctcgatctgggcgagggacagttccttgggcatctcgccgaagccgatgcccttgcccagggcgatgagttcccggccattgccgtcgcggcagagcgccacattgttattgatcctgcgtatcgccagcaatgtccaagcctcctgccccgttgcaccgcatcaaatcatgggaggaagaaaaaaactcttcaaagcaaaagaaaacaggcacagggtccctgtaccggtcatgcctcaaagagtaacattccaatgatttgattcagttgtttcatcgaccatgccccatgcgggtaacatctcgattacagacaatatagcacagatgcagcagccggtcaatgggcagtgtaaacaaaaagttcacaatttctttgtcgggaacgcccctgccctgctcaccgccggtgggtggcacggtagagaagctcggcatagctgtggatgccctcctgggccagcttgtccggccagcgggcaagaaacacctgccagacctgttcctcgggggcggtgtactgctgcatccgctgggagaaggtcagtccgtactcggcaatgatgcggtcacgctggtcggcgggcagagccttgccggggcagcggccccggccgctcagccagtgctcgatgcggtagatggccgcggcgctgggccggtcccgccggttgcgcacggcggcggttttgatgttgggtttcgtggagggaacctcccggtccagctggtaggtgcggccgtccacggcccggtattcggggcgctgctgctggaaccgcgcgctgttcgccgccgcaatcaaggtcttttcccctttgtccatattgaaagccctccccttttctgtgcggtccggtgccggtctgtatgggtatcataccatgaaacggcagaaaagaaaacggtttgacgaggaaaagaagaaacaagaaaggccgcccggcagggttcaaaacccggccgggcggccttgtatcatgataaattcagcagacccagtcccaaattacctggctttgggggtcagcacggccttgccgcccatgtaggggcgcaggacctcggggatggtgacgctgccgtcggcctggagatggttctccaggaaggcgatgagcatacggggcggggccacgcaggtgttgttgagggtgtgggcgaactggctcttgccgttttcgtccttgtagcggatgcgcaggcggcgggcctgagcgtcgcccaggttggagcagctgcaaacctcgaagtacttctgctgacgggggctccaggcctcaatgtcgcagctcttgaccttcaggtcggccaggtcgccggagcagcagtccagctggcggacgggaatttccagagagcggaacagctcaacggagttatgccacagcttgtcgtaccagtccatgctgtcctccggcttgcagacgacgatcatttcctgcttttcaaactgatggatgcggtaaacgccgcgctcttcgatgccgtgagcgcccttctccttgcggaagcagggagagtagctggtcagggtcaggggcagcttggcgccgtcgatggtctggtcgatgaagcggccgatcatggagtgctcggaggtaccgatgaggtacaggtcctcgccctcgatcttgtacatcatggcgtccatctcggggaaggacataacgccctgcaccacgttgccgtggatcatgaagggcgggatgacataggtgaagcccttgtcaatcatgaagtcccgggcataggccaggacagcctcgtgcaggcgggcgatgtcacccagcaggtagtagaagccgttgccggcgacccggcctgcagcgtccaggtcgatgccgtcaaagctctccataatgtccacatggtacgggatgggatagtcgggcaccacgggctcgccgaagcgctggacttccacgttgcagctgtcgtcggggccgatgggcacgctggggtcgatcatctggggaatggtgtacatgatatcccggatcttgacctgcagctcgtcctctttggcttccagctccttcaggcggtcggcctgggcggtgacctgcttcttcacttcctctgcctcggcggccttggaaggatctttcttggcctggcccatgagcatgccgatctgcttggacagcttgttgcggttggcgcgcaggctgtccgcctcgccgatggcggcgcggtactcagcgtccagggcgatgacctcgtccaccaggggcagcttggcgtcctggaatttcttcttgatgttctccttgacctcgtcgggatgttcccggacaaaacggatatccaacatggtttcccactccttcaatgactgtgaatttgtattggaattactggggttttattaatgatacggcttacatgccgtcggcagactcggggtcgtactggccaagcagctcggcaaagcgggacagctgggcgtcggagtaaaagtcaatctgcaggctgccgcggccgtccttgtactggatgcggacctcgctgccggtgacgtccttgagggctgcctcgatctcggtggcgatcttgggccgggtgaaggcatcctccaccggcttgggggccttgggcggacgggagagccggcggcagagggcctcggtctggcggacgttcatgcccttggcttcaatctgctgggcggcggcttcgatgaggttggcatcggacagacccagcagcgccttggcatggccggtgctcagcttgccggtgcggacctgttcccgtaccgggtcgggcagggacaacaggcgcagggtgttggccagagcgctgcggcttttgcccagccgcttggccgcggtctcctgggtcaggccgtacttgtcaatgagctgctgacagccctcagcttcctcgatggggtcgagatcctcacgctggagattctcgatcagggccagagcggcggcctgctcgtcggtgacttccttgaccaggacggggacctcgtccagcccggccatgcgggaagcacgccaccggcgttcacctgcaatgatgatgtagcccggccccgcttttttggggcgcaccgcaatgggctgcagcaggccgttttcggcgatgctctgggaaagttccgccagggcagtctcgtcaaaggttttgcggggctgctcggggtcgggttcgatctcccgcagggggaggctggtcaccgatgcgtcgtcggcggatgtctcgggcaggtcggcgaacaaactgtccagccctctgcccagcccgcctttgggtcttggcattctggattacccctttcttttgcgcggttcccttttgggggatcagtctttttcgttggcgttcaaaaattcccgggccatggccatgtaggcgtcggagcctttgccgttgggttcgtagaaattgatgggcataccgaagctgggggcctcggacaggcggacggtgcggggaatgacgctcttgtacaccttgttgccgtagtatttcttgacctgagccaccacctgcatggtcaggttcaggcggccggagtacatggtaaagaccacgccctcgatgtccagataccggttgtactttttgcgcaccgtttttaaggtgttcatcagctcggaaaggccttccagggcgtagtattcgcactggatggggatgagcacggtatcgcaggcgcacaggccgttgagggtcaacaaatccaaagacggcgggcagtcgatgaagatatagtcatacagcggcaccacgggggccagagcggtgcgcaggcagttttcccgccgcgccatggagaccagctcgatgcccgcgcccgccagttcggtgttggagggcagaagatcggcgttgaacttggtcttgacgatggcttcccgcacgtcggtctcacccagcaggcagggataaatgccggagttcagggtgtgtttggcgacgccgtagcccgaggtggtgttgccctgggggtccaggtcaacgaccaggacttttttgcccagagatgccacgcaggacgacagattgacgacggtggtggttttgcccacgccgcctttttggtttgccactgccacgacttttgccattgcgccttggaacctccctttttgccggatttgagtaggatcaaaatgagtcagtgttaaaattatagcacaggaagcgtccaataaaaagggcgcagacggatttttggcgttttttccgttttttgaagggccaaagggccggattttttgattgggagggtgtgattttgaaattttttgatttttggggtgtttggggtgggaggtggttgttttttgtgggagggaaagttgcttccgggtggacggcaggcaaggcaggggttggattatttaagatttttatttggtaaccagaggttttctgtatgctgcgacgtttcaggaaggcgtcatctaacagcagactgccgctttttgcgcggtcaaaaagcggcggaaaaacccgccgccggtttcgaggcggcggccgcacgacttgggggctgcacgcccccaagacccccaaagaggaggtcgaaggcggtttttcctaaaaatgaacacagtacattttcttaacggaaaaaccgccttctccatctctgaaacgctgcggcgttggagtcgtgaagaaaaacaacaggcaaagagtaaaagcaaataaatggggaaggaaaaatacggaaatggcaatgtgagttctatagttctgaccttccgtaagggggcagtgacggatggttggacaagaaagaggttgatttacccgcatagtttgagtttctaagtttggtcgcgtaccgcttgcccctacccgccggactgtgcggtccgggacggataccccctgccacatcccaaaccgcaagaaccataaaaccaaggccccccaaaggccaaatccgtcccggctgctccgttatataaatggaacacaaaaatgttccacgtggaacattttgaaaaacgccacacaatcacaagcctgccgcaaggttttctcaaggtatcccctgccccggcctgctaaactgaaactgcaaaccttcccctaccaaacccagaaaggagaacctccacatgcccggcagaccatccccctcctccagccgcgtcccgcgcaccggtgtgggccgtcccgctcccggcagccgcccaccccgccgcggggcatcccctgccgcccggccctccggtgcgcccggaacttatgacccctcccgcggccaggacagatatgactcccgccgtccctccgggcaaaaacaaaatcagtcggcagcccgaccgacccgccctgtccgccgccaccggtcacggcgggcaatgggcagctttctctttacctttctcatcaccatggccctgctgctgccctgcgccctgggggtggggttctgcctgcggggtaaactcccggcagaaatcggggtggatgccccctcctcctccgtcagcacggcggcgggaattgtttcctccaatcccggcgagcaatctcaaggctcctcccctgccgtggacctcaccgggctgaacagcgcccaggctatcctgttggagcggggcggcagcaccctgggcgagcagaatgccgacgactccatctacccagcctccctgaccaagatgatgacggtactgcttgccgccgagaacctccccgacctggacgtctccgtcaccctgaccgacgacctctttgccccgctgtggtcggccaatgcctccatggcggggttccagcccggggagacagtgacggtgcgggatcttttgtacggtgccatgcttccctccggggccgagtgctgcgccgccatcgccaaagaactggacggggacgaggctgcctttgcggatcgcatgaaccgccgcgccgaagaactgggcatgacggccacccactttaccaacgccaccggcctgcaggacgaaaaccacgtcaccaccgtgcgggacatggcccgcctgctggacgccgccctggacaacgacaccttccgggaggtgttcaccgcccggtgctactccacccggcccaccgacctccaccccgacggcatcacggtgtacagctcggtcttttccctgctggaagatgccgacctggggaccatgaccctgctgggcggcaagaccggctttaccgacgaggccgggctttgcctggccactctggtggaagggggcggcaaagagtacattctggtcacggcgggggctccgggccagagccacaccgacaccgcccacgcccgggacgccgccaccgtctgccgccgcctgtccgacgcactgcaggaaaatatctctccgtgactgctgccgccggtcccggctgtgcggtacagggggccatcaccaggccggggccgcatgggcggatgatgaaaggaaaaccggaagaacggcattaaatttgtgcaaaaacgcctttgaaaaaacgggcggaaaggaatacaataaaaaatacagcgtgtagcttaactgcgtaaatccggttgggctgcacgctgttttttttgctcattttgatccaaggaggatgtatccccatgaacgaacgtcccgccaaccaatttcttgagaccgaacccctgggcaggctgatgcgccggtactcggtcccctgcgtcatttcgctgctggtcgcggcgctgtacaacattgtagaccagattttcattgccaacgccgggtatctggggtcctacggcaacgctgccaacacggtagtctttcccctgacggtggtggcgctggccatcgccgtcatgatcggggacggctgctgtgcctatgtcagcatctgtctgggcgccaaaaattccgacgccgcccacaaaagcatcggcagcgccgtcctgctctcggcgggggcgggcattgtgctgacggccctgtacctgatcttcctcagccctttggtcattgccttcggcggcggagtcaatgacgcgacctacggctattcctgcgaatatctgttctggatcaccctgggtatccccttttacatgttcggccagaccatgaaccccgtcatccgctcggacggcagtccggcctttgccatggccgtcaccctgggcggggcgctggtgaacatcgtgctggacccggtgttcattttcggcttgcactggggcatgatgggcgctgccgtggccaccgtggcggggcagattttgaccgccgtcctgtcggtgtggtatctctgccacatgaaggccgtccgcctttcccgggagagtttcggcatccatgctgccatcgccgccaaatatctgccgttggggatctgcagctttttgtcccagatctccctggtggcggccatggcggccatcaacaacatgatccgcaaatacggcggcctggaccccgtgttcagccagaccgagtacgcccagatccccatggcggtggtgggcatcgtcatgaaattcttccagatcgtcatttcggtggtggtgggcatggcggcgggatgtatccccattgtgggatacaacatcggcgccgggcgcagcgaccgcgcccgcaggctgtttttgctcctgctgggcagcgagtttgtcgtgggcatcattgccctgctcattgccgaactgctgccgggacagctcatcgccctgttcggcgccgccaacgaaagcgcctactacacccagtttgccctcaaggcgttccgcgtctatctgtgcatgctgcctttggcctgcatcaacaaggcgacctttatctacctgcaatctctgggcaaggcgctgctgtccaccgcgctgtccatggtgcgtgagatccttttcggtgtgggatttgccctgctcctgccccggttcttcgggctggacggggtgctgtactccatgccggtctccgatgtgctgacctttctcatttcggtcgcggccatttgctggaccctgcacagactgaaaaacctgccgcagctgcgcacctgatccccgctgcgcaaaacaccccgggaaagccgggcaaagcactttgatgcttgccccggttctttcccggggtgtttttatggaaagcggtatccggtatcggcagacagcggcctgccccaaggcccagtcccctgccggtcctttgtgggacggggctgacctgcggtggaatctgcggcatctgcggggggcgccggaccggccaaaaggtccctgtcagtcggcggaacaggcagcgggttcgggttcggctccggtttcctgccgcggggattcctccccggcaggctccacctccgacaccgtcaagatgggcgcgggcagggtcaggggcgtggcctcggcggcctccaccgggatgcggacgatgtactccaggcacccgtcccgcttgccgcaggtggtggtggcggggatgcctttctgggccatcaggtccacggcgtgctgcagggtgttcacgaacagccgcacgtccttgaccatgggggtggtcttgcggcagggggatgcctcccccggcgcggcggtgagcatggtctccaccagcttgtcggcctcccggacgctcatgccgtcccgggcgattttctccagggcggcggtgcggcggctttcgggcaggcggagcaccgcccgggcgtggcgctcgctgagatggttggcaacgcacagctgctgctgttcggtggtcagggagagcagccgcagtttgttggccagggcgggctggctcagccccagacggcgggcggcctcggcctgggtgcagccccacagccggatgacctccctgatgccccgggcggtgtcaaaggggtccagctggctgcgctggatgttttccagcaaacccagggcagcgctctcgctgtcgttccagtcagccaggatggcggggacccgttccagcttggccaggcgacaggcccgcagccgccgctcccctgcaatgagctggtatttgcggatgcccacccgccgcacactgatgggctgcagcagcccgttctgcagaatgctcaccgccagggcggcgatctcggtatcgtcaaaggcggtgcgtgcctggtagggcgacggctcaatggcgtccacgggcagcataagcaccttgcccggcttttgcttttccatcataggtttttccctccgtcatgcaaacaaaacggcctgcgccggttttgagacaagcaaaacgcggcgcaggccgtcagggccgttatccaggtttcccttccccatgggaaggagcagacccgccgtccgggcaggatatcaagcggaactctgccgccctgtttccctttgcggggaaaggggcggcgttccgggattcctgccatggccggtctgctgtattccggtatccggcggtcctgcctttttgcggcaaaaccgcggtttccctgcccttcctccgccgccttcgacggcggggcggcccatgctgcgtttttcaacaagaaaagcatagcacagcggcggggtcccggccagcaaaatcgttcgccggggttcggggcaaatcggggactttcggtactcttacaggggcttttttgcgatttttccgccgtttctggggtatgcgggcggagtttgcgatattttttccatgaccagcagccggcgggcgctgccgtcgggcagggtgaaggcccggtcgtccgccgcacggccgcccagtttgcgcagggcattggaagccagttccagctcattgtcggcgtcggggcctttcatggccaggaaatgcccgcccaccttcacaagcggcaggcagtattcgcacagcaccggcagggctgccaccgcccgggcgctggccaggtcaaaggcttccctccactgtttgcgggcggcttcctccgcccgttcccggacgaactccaccccggtcaggcccagctcgccgcagacgtacttgagaaaatccatccgcttgccggtgggctccatcagggccagctccagttccggcttgtagatcttggccaccacgccgggaaagcccgccccggtgcccacgtccaccatgcggccggagacctccggctgggcggcaaagagcaggctgtccgcaaagtggcggtcctcgatgccctccggggtggtgatggcggtgaggttgaccttttcattataggagaccagcagctcggcatagcgatccagcaggtccagctgggtgccggtcagttcgatgttccacgtggaacatttttgtgcaaggcgttcgcggtcgatcattggggttcctccctgtggggtgtttcggtgggttcggctttggcggcgttccggtgcaaaagggccagggacagctgggagaggtcgctgggggatacccccgggatgcgcccggcctgggccagggtgcggggacggatgcgggccagcttttcccgggcttccagggtcagggtggtcaggggggcgtagtcaaagtcggcggggatctccactttctcgtggcgctggatctcccggatgatgcgctgctcccgggcgatgtacccggcgtaacggatctcggtctcgatgcgcagggccatggtgggggtgacgccctctcccctgccgatgactttggcgatcatctcataccgcacggcggggcggcggagcagttcctccgccgtgccgccggtctcgccgatgtcgacgtccccggccacggctttcaggtcggccagcttcaccttggtggaggccagccgggccagctcggcgtttttgatgtcccggtcgtggcagaacaccgcccagcggtcgtcgtccaccaacccatactcccggccgatgggggtcaggcgctcgtcggcgttgtcctgacgcagggacaggcggtactcgctgcggctggtcatcatgcggtaggggtccatgacgcccttggtgaccaggtcgtccaccagggtgcccaggtagctggtatgccgggccaggatcagctcggacttgcccagggcatggcgggcagcgttcaggcccgccagcaggccctgggcggcggcttcctcgtagccggaagtgccgttgaactgtcccgcgccgtagacaccggccaccgccttgctttccagggtgggatgcagggtggtggggtccacgcagtcgtactcgatggcgtaggcggggcgcatgatctccagatgttcaaagcccacgatggagtggtacatggcgttctgcacggcctccggcaggctggaggacaggccctggagatacatttcctcggtgtcctcgccgcagggctccacaaagacggggtggcgttccttgtccttgaaccggacgaccttgtcctcaatggaggggcagtaccggggacccacgccctggatcatgccgccgtacagaggcgaccggtgaaggttttccagaatgacccggtgggtgtcggcgttggtgtaggcgatgtagcagtccaccttgttgtgcatgggggtgcgggtgagaaagctgaaaggctgcaggctctcgtcggggtcgccgggctggcgttccagcttggaaaaatcgatgctgcggcggtggacccgggcgggggtgccggtcttgaaccggcgcagagtaaagccgtgggccaccagatcctcggtcaggcgggtggcggcgtgctggccgtcggggccgccgtcatagtgggcgtcgcccacaaagatgcgtccgcccagggtagtgccggtggcgatgaccacgcacttgcaggcgtagtagccgttcaagttggtgtagacgcccgtcacatggccgtcctgcacgtccaggcccacgatctccgcctggtggatgtccaggttgggggtgagttccaaagcatgcttcatatacatatgatagcgcttgcggtcggtctggacccgcaagctgtggacggcggggcctttgccccggttgagcatcctgctttgcagaaaggtggcgtcggcggcaatgcccatcagtccgcccagagcgtcgatctcccgcaccaggtggcccttggcggtgccgccgatggagggattgcagggcatattgccgatgaagtccagtgtcagggtaaagacggcggtccgtgcgcccaggatggcggccgcatgggcggcctcgatccctgcatggcccgcgcccacgacgataacgtcgtagctgccaagatgatcgatcaaaatggttcggtcctttcggagtttttattgtgttgtggttattgtactttttagggaaacgggcggctgtttgcaggcccggattatttgagatttttatttggtaacccgttgtgtggtttgggtacgacgcttcgggcggacggcaatttttcttagccttacttctttcaccggtgaaagaagtaagcaagaaaggcgccgccggtttcgaggcggcggccgcacgacttgggggctgcacgcccccaagacccccaaagaggaagtcgaagtcgatttttcctaaaaatgaacacagtacattttcttaacggaaaaaacgccttctccatctctgaaacgctgcggcgttggggtcgtaaggaaaaacgggaggcgaaaaagaaagggacggtacgttgaaagcatttggaaagctttgccatggctgaatcttgggcgaaagctgtatgtttttcttataggtttaggttcctataaaagcatgggcctatgtatcaggtacaaagcctttccatcaggcggcggtctgcgggagcgggccgccgcacaaatatgggaggccgggtgaccgtttatcttgtgatgcacaaaacgcgcctcgtcgaccggtcatctcaagttgcaggaggcaattctcggcgcgacctactttttgccccggggtttcttaaggggcccgcaggccccttgagccgtgcctcccgcggaggaaccgcgcaggcgaaacaaggaagcaaaggttgcgcagcaactgcgaagcaccgcaaaatcgctctggtgcgacagatgctaggcggaggagcgatggcagtctttgtgactgccgagtaacgacaacgacgcagatgttgtgccagagacagatttggcggctttgctgccttgttgagtggcgcgcatcaggggcgggtttttccgccgctttttgaccacacaaaaagcggtagtctgctgttagatgacgctttcctgaaacgtcgcagcatacaaaacgtctctggttaccaaataaaaatcttaaatccatcgggcatcaaaacagcccgttgcattccccggaaaccagcagctttcaaaccaggcacaagaagtcccaacaaaaagagtaacttatcctttcggcggcaagattccctcggtatccaccacatagcgtttgggattctccgggtcgatgcacaccggcagagtggtgcggttttccagataaggcatgggattgtaccagatggaatcggaattgaagcaaaagactttttgcgtctgggggtccagccaggaacaccggatgacgtagggacaccgcccattgacccgcaccgagaaattcaggctcacatcgtcgatgtttgcctggatgcggcgtcccgtctccagcagatgggcctcccgtgcggcgcggcggcgcagatacaccagcatgccgatggcaatggccacgaacaccgcgcccagccccagatggatcaggggccagcgcagtccggtgtagtagcacaccgccccgccgatgcccataaagataatacccacaatggaaaacactgccgcacagatcttcaatgccgttttcatgacacgactcccctttcccggtttggcaaaatcacttgcccacgcagaaggtctcaaacacctggtcgatgacggcctcggtggcgtcctcgccggtcagttccgccaaggcatggagagcatcctcgatgcagatgcccaccgcgtccaggccgaaccccgtatccacggcggcgatggcctcgttgaccgcatcccgcgccgccgatgccgccgcaaactgccgggcattcaccagcgccgcggcgccggggtccagctgggccgtgcccaaaagccctgctaccgcatcgcacaggggggacaggctttccttgtctttggcgcacagccgcaccgtctgcttaaagtagggcatcagcaggctttcgtcaaagccggtatcctccgccgccaggtcctgtttgttgaagatggccagggcgggacggccctcgcaccgctttgccagggcgatgtccgcctccgtcaccggctgcccggcgtcaaatactgccagcaccagcccggcttcttccagctttttccagcttcggcggatgccctccgcctcaatggcgtcgtcggtctcgtcctcgccccggactcccgccgtgtcgaacaggttcagccggatgcccgtgtctcccagcagcactgcctgctccaccacgtcccgggtggtgccggccaccggcgtcacgatggcacggtcaaagcctgccagcaggttgagcagcgtgctcttgcccacgttggggcggcccagcagcacgcagtccaccccgcggcgaagcaccgcccccgcgccgtagtccttcagccagcggtccagcttttcctttgcctgggatagggtgcggcgcatttcctcgggggccagctcggggacgtcctcctccgggtaatccacccaggcggtgaggtgtgcggccagcgcccgcagatgttgcttgatctcctcgctctcggcggccagacgcccgtccagggcactttttgccagggctgccccctgccgtccccccgccgagatgatctccatgacggcctcggcctgggtcaggctcatgcggccgttttccagagcgcggcgggtgaactcccccggcccggccggagccgcccctgccgccagcagggcttcgatgagggcgtccgccatgacgctgcccccgtggaccgaaagctcgatcacatcctcgccggtgtagctgtggggcgcccggtaaaacagggccaccgtctcgtccatttcggcgccattcagcacaaaatgcccgaacagggcggtgtagcccttggcatcggccacacgcttgtccttgtgcagcgggacaaagaccttttccgcaatggggtaggcgtccgggccggacagccgcaccaccgcgatgccgccctccccgggaggcgtggcaagagcacagaccgtattgcgcagcagcatcccaaaatctcctttttggcgagaaattccccccgcatcgacaggcgaggataaaaaacaatatacatatttatgataccacaaaacctgccccgggacaacgcagagtttccccgtcatggcccggaaaatccccacataacagctatgccgcccgccctgcaaaacttcccgttgcagggcaggcggcatgaccgcggcggcgggctgcggaagggtccggcgacacccgccgccgaccggcaaccgccaggaaaagcgaatgaattactcccccagcttcccctttgcctttttcagaaaactgtcactttttacgataaaacgttcatgttctccgtcgcccaccatgccttttgcatcgtggacttctaccttgaataccagccgccgaccatcgatttcctgcagctcggttttggcaaccacttccatgcccaccggcgtggcggacagatgccgcacccgcagggcggtgcctaccgtgccgcagccttcctccagcatgggctggacgctctgccaggcggctttttcgatcagggcgatcatggcgggggtggcaaatacctccaaagcgccgctgcccaggttggcggcagtggtctcgggggtgacgaggcagcgggcctcgccggtgattccggtcttgagcatggttcgtcctcctgttgtgttactgctgtcagtataccccgcccggtcccccggtgcaagagcgtttcccgtaccgcatcccccgctccggctgctgccgtcccaaagagcaaaaagttttccaccatgcagtggagccgcagggaaaaactttgtccttcaatggcaaacaaaaacaggcaaaaccggcaggattttcctgttttggggcttttttgtccgcaaaactccccaagtttccacatgtttcaacagggttttcaacattttgcggaaaaaagttgaaaacgtcgttgacctttgcaggggcggcggtgtattgtagaactgtcacattttcaaaaagccggaacaaacgttctggtcccttgcccggatcatcccgaggcaaaggaagataaaggaggaaccctctatgtccccgaccgctcccgcgccccaaagcagccggcctttttcccgggacggcatcaagctggcggccatgctgaccatggcatgcaaccactttgccgctgccctgctgcccgcccagggcattgcctacgaggtgctcaccgacatcggttactttaccgccgtgaccatgtgctttttcctggtggagggcttccgctacacccgctcccgcaaggcctatgccctgcgcctgctggtgttcggggtggcggcgcagccggtctacatgctggctttgggcatcgggcagctgaacatgctgtttaccctcatgctctgctttctgatgctgtgggtgatggaccgggtccagagccgggcgctgcgggctgcggcggtgtttttcctggccatggccaccgtcttttgtgactggccgctgctggctgcctgctataccctgctctttgcctgggcggagggccggcccaggcgccaggccttcgcctttctgtcggcggcagcactgtttttctgcttcaactattccaattattcttacctgggcatggcgtcggtgcaggccggcctgcacgcggggctttcctgcgtgggcatcctggtggccggagcggtcctgctgctggggtacaacggcaggcggtccgcctttgccctgcgccatccgtccctgacccagtatttcttttacctgttctaccccgggcatctggcggtgctggccatctgccgcgccctgctgtgatgccgggaccaaccacgaaaggctaaattcatgaaactgccctttatccagagcaaaaaccagaccggtgcccaaggccccggaccggacatccgcccctatgtggcagccatctaccggggcaaccggttgaaattcgccatgctgctggggctgtactttgtcattatcctcattcttctggcacagtcctggcttctgggcgaactcatcgaggtcatcaccgcccccagccggcagcgcatcctgcgggatgtggtcattgcggcggtgctcattgtggggctggggctggtacagctggcccaggcgcctttgcagtcccgctttgtccataagggccttgcccagtacaaggaaactttgtttgccgccctgacccgcaaaaatatcagcgcttttacaaaggaaaacactgcccggtatctgtccggcctgaccaacgacgtcaattccattgaggaaaactacattttcggcagcatctacatcgtgttttacctgctgctgtcggcgggagcgctgtcggtcatgctggcactgtgctggcagctggcgctggtgggcatcctgctcagcgtgctgcccggcgtggggtcgatgctcatgggcagcgagatgacccgtcgggaaaaggccgtcagcgatgaaaacgagcattttgtgggccaggtcaaggacttcctcggcggctttgcggtggtcaagagcttcaaggccgagagccagagccgggaacgctttgcccggcagaaccgggttctggaagcggtcaagggccgccgccggttctggaaggtgtgcgtcaactcctttgccaacttttcctccagcattttccagatcggcgtgctgctggcgggggtgtggtttgccctgcagggggacctggcggtgggggcggtgctcaacatcaccaacctctgcaactatatctccgagaccctgctccagcttccccagctgtggtcggggtatcaggcatcccggggactcatagaaaaagccgccgccgtggtggagcagaacaccgcacagggcggcactcccctgcccccggtgctggaggacgccgtcaccctggaccatgtctcctacacctacggcggggacaccccggccctgcaggacgtgaccctgcggtttgaggcaggcaaaagctacgccgtggtgggcggttccgggtcgggcaaatccacattgctcaacctgctcatgggggccttccgggactatgaaggctcggtgaagatcgacagccgagaactgcgggacgccgacccggacagcctgtacgacctgttcagcctgatcgggcagaacgtgtttttgtttgacgacaccctgcgcagcaatgtgaccatgttcgccccctgcgacgaggccgacctgctccgggcggtggagcgctccggccttggggagctggtgcaggagcgcggcctggatatgccctgcggggaaaacggcagcaatctttccggcggtgagaagcagcgggtgtccattgcccggagcctgttgcggggcacgccggtgctgctgctggatgaagccaccgccgccctggacaaccgcaccgcctttgcggtgaccagggaaattctggacctggagggcctgacccgggtggtggtgacccaccggctggagaaatccctgctcacccgctacgacgaaatcatcgccatgcgggacggcaagatctgtgagcgcgggacctttgaggagctcatgtcccgccccgggtatttctactcactgtacaccgtcagcggcggggcgtaagggcggagatgcctgggccggtaaagcaaacaaagccataaaacggcaaaggcggcgcggcatccgcccgctccgcgcatagaaaataaaacatcccccgcctcggtacagagccttctgtccggggcgggggatattttttggacggggcaagtcggggtcaggtctccggggtattagaatcaccaccgaagcgcagggggcggaaaagtcccagtttggcccgccgcagccgggccatggcgggggtggtggacagaacgcccagcagcagcacgccgaaagccgcccccgaaagaaagccccgccccaggctcaacaacggggtgcggggcagttccagcacctccgttatcataagggcgaataccgccgcggcccccgccgcaaacagcagccgcagacggcgggaataatcctgcctgtcccggccggcgtactccgccgccgtgcgcagggtgtcctcggtcttgcattccatggtctgtaccggctcctttcgctcgccgttcaacagttcctccatgcccacgcccagcagctgtgccagctggggcagcagggcaaagtcgggcagattgcgtcccgtctcccaccgggaaacactgcggttgctgacacagagccgctcggcaagctgttcctgggtcaggcccttttcccgccgcagctgccgcaaaaagacgccgaatttctgctgatccaaagaagatccctccttttttctgcctttatcataaggcaaaaggcttccggataacaggacacagagagggaatcccaaaaaatcccccggtatgacctttctcccgcagccggacacacaaaaatcccgcccccgacgattggttgccgtcgggggcgggatgctttgtatcaggctgtcttacagctcgatcttgccgaacatggcaaagtcgtcgccgtcatggatgcgctccacgggggcgggagcctggggacgggcctcgggatcgcgaggagcgtccgcaaactcacgggcgggcacgtaggaaccacggctgccgctgcggttgccgccacggcagccggaacgtccgccacggccgctgcgctcaccgccgcggcggttgtcgccgcggaagccgcgtccgccacgattgccgccattgcggccccggccattgtcacggccatgaccgccgcggcggcggctgctctcacggtcgggcaggttgcaggcgtcgggatcggtggagtagatgaccacacggcggtcggcgccctcgcccttgctctcgctgcggacgccctcgatggcggccacggcggtgtggatgatgtgacgctcgtaggggttcatgggctccatctcgtagtagcagccggtgcgcttgacacgcacgcacaggcggccggccagagcagccaggtcgtcctcccgcttgccgcggtagccggccacgtccaggcccagcttgacgtagctgccttccatccggttgaccaccaggctggtcaggtagctcaggctctccatggtctcgccgcggcggccgatgagcacgcccacgtggtcgcccttgatgcgcagaatggtggcctcgccctttttgacggcggtgaacaccaggttggacgcacccatcatctcacagatgggacgcaggtagtccacggcggcggtcaggcgctcgtccgcggcaatgtccagctccacctcagcggcggcgtcggcggtctcctgggcgggagcctcctccgcttcctcagcaggagcggcttcctcggcgggttcctccgccttgggggcctcagccgcgggctcggctgcaggggcagcctccacgggggcggcggccggagcagcttccggctcctccagctttaccaggacgcgggcagggatggtcttgaacagcttcttgacagggaaatccagaacttcgtagctgacgttgatgtcatcgcggtcaacgcccagggcgtcgcaggcggcctggacggccagttccacggttttgccggtcatttcgatctcacgcatattatttgcctccctttttctttttgctcttgctctgtgcttccagttcggcgcgctcggcttcggtcagggggcgggtgcgctcgtccttgtacttttcggcatccagggcgcgggcgcgctccagacgcagacggttgagttcagcctcgttgacctgcttggtcacttcctggccttcctccacaacgatgacttccttcttggctttcttggcggcctttttggcggccagttcggcctcatattctgccttgaagcgctcggggctgtagactttgttggtgaggacggactgcaggatcatgcagatgttggaggtggtgtagtacagggagaagccgatgggtgcggtaaagcagaaccacgcgaacatcaggttcatgacccacagcatgatcttcatgctgccctgggtggcggcctgctggccgttcatgcgggtgacgatgatgttggaggcgaacaccgtgatggtggccaggatggggaagatcagcaggggggacagggtgaagccggcggtggtgcagacgtccatgcccaggaaggtggtgttgaagccctggatcaggccaatctgctcagtagtcaggccggtgaccacgtcggtgcctgccttgatggcggtgatgagctgggtctcagccagggtgacgttggaggtgctgatgcccagggcggtgcaggcggcgttgatggcgtcggcagggatgcccagaatgtagcgcaccggatggtagaccacctggatgatggcgaagaggatcagcatattcagcagcatgggcaggcagcccgccatggggttgtagccgtattcctgctggaacttcatcagttcctcgttctgcttttcggggttgtttttgtacttctgctggatctcgttgagcatcggcgtgtagaccgacatcttagccatggatttctgctgtttgatggcgagaggcagcgaaaccacgcggatcaggatcgtaaatacgatcatggtgagcgcgtagctggggatggcctggtacatcagggccatcagggggccgaggatgatcgagaggaaaccaaatatttcagtcatagcctgtccaatccgccccgcctgcgcacggggcattttgttatgttttttctaaaagcccccacggcgcagcacagggacaaaaaacaaggaaatcaaggcccgtccggtgaaacgcaagactccgcttgcagccttgcgctgttgtgaagccgcgcaaaaagtgcgcttacttttcccgggtgagccgccggtcagggtgtgtccagcggcctttgggcggcaccgggtcgtagccgaaccggcagaaggaattgcagcgcagaatgcgccacaccgccagcagcccgcctttcaaaaggccgtggacggtcagtgcttccagggcgtactggctgcaggtgggaagaaaccggcagtgatgccccagatgggggctgatgtgtttctggtacagccggatcagggcgatgaaaggccgggtaagcagcggcggggtcattgctgtctggccaggtcgggcagaccggcggcgcgcatgagctttgccagcgtgcggctgacctgggtgcttttgagccggggggtctgggaccgggccaccaggatgatgtcgtagccgccgatgtcggcgggcaggtgttccgccagagcggcacgcatgaccctgcgggcgcggttgcgcagcacggcgcagcccacctttttggtggcggtcaggccgatgcgggtgtggcccacccggtttttggcaacgtacagcaccagctgcgggtggacgtagcttttgccccgtgcatagacgcgggtaaattctttgtttttgcagatggtgcggtaacgcataatacctcgttatcccgcggcaggcgggtttgaaaaaaggctgccgagcgcacggccaaacacaaggaaaaagcctccgataaaataccggcggactttttgatcttgcatttgaccaggatcagcagcctgaaggtggattcgtgggtcgactgacgatgtgtcctgttcaaatacccgagaaaccgtatttcattgaaaagatggcccgcagccgggccgttgcgtcggtgacgccggtgaccggaatgatcagacggtcaggctcttgcggcccttggcgcggcgagcgttgatgaccttgcggccattcttgctggacatacgcttcaggaaaccgtggacggcactgcgctgacgcttcttcggctggaaagtctgtttcattttacatatcctcctgtcccaattacggggtgaatttcgatgcctgggctacgccccatcgagggacagccttgcagactatgattatatcccatcgtcaaggcttttgtcaacacccaaaggggattttttgccttttgtatgtgttttttcacgaattgcggggcaagtcccttcccctgctccatatcttgttgtgccgcttgccgcgggctactagatgtcagccccggtcacagcatggcctggccgttgatggaaagggcaaaccgcacgcccagcttttcggcggccttgcggcagaggatcatgcggtcgaggaaaatttcaaaataatccatgacggcgcagaaatcggtgtcgatggtcagggccaggcggatgaccccctcctcaaacagcacctgggattccttgaccgaaaaattcacccggtcgtggatgtcaaaggtggtcttgtccttgttgcgcacacggttggcccgcacgtcggtcttgtcggccaaaatcagggcggcggccacggcgttcaccgggaaggcggtgccctcgtcgtggttgccgatggcggtgatgacggtggcggtctcctccgggtcaaagcccagcttgtccagaatgcggaacgccatgaccgcgccgctctgggcgtggtcgatgcggttgaccacgttgccgatgtcgtgcagccagcccgcaatggcggccagctcagcggtgcgggcgtcgtagcccagccagagcaggatgcgccgggccacgtccgccgcccggcccacgtgggcaaagctgtgctcggtgtagcccagggcagccagggattcgtccgccttgcggatgtaggcggcgatctcggcgttctgccggatattgtcaaaggtaacgctcatcaaagttccctcccctgttggttggcggttcagtctccggcggtgcgggcgtcggcctgctccagaatggccagcagggcttcgtcccgcatggcggagacgggggcgtcgctgcccagggcctcccgctgccagccggtgtagtcggggccgtccccggcagcccggggcagggcggccagcccccgcagcacccagacggtgcgggccaggtcggtcagggtctcctcctgacggtagaagtttgcccaccgcccgtgggccatatcccgcaccacacggcgggcagtctcgaacccggcagcggagcggcccaccttcaaaaagcaggcgcggtagtccccggccgtccacagctgccaggcgtcgcacagctccaccacgcccttgagacagtagcggtagatgcgcacctgacccagcaccgtgtccgtccaaagacgggtggtgggccgggcggcgtactcgcagccggacagcagagtgtcgaacccgggcagggcatcggcgcagacgccccgcagccaggccagctgctcggcaaagggctggtcccctgccgcccagcgcagggcgggaagggagcttttggtccggccggacagccaggctgtggccaccgcccgggcggcgcaggccatgagctgctcccccgcccgctggtcgggccaaggtccgaaggcggcggtggaggtgaaccaggatttgagacaggtattcagatcgtccagctggcggtcctgcagggcccagccgtcgggggcgcggtagtaggtgcgcagataggctgcccggtgggcgtccaggtcggcgtccacgttgcgccacagggcggccagggcatccagaggatagacatggggcttgacgctgcccgcacagaccagccacatggcccgggcgcccttttcaaaggcgtcgcacagttcccgcgcggccagatccatggcggcggggcgcatggtcagacagttgcccgcctgaccgtcgctgtacgccgcgtggaaccagacgccgccccgggcgccggtgggctcggggggaagctggggggtgcggggatcgcggctgccctcccgggggctgacgaacctgccgtagccgttgtccggccagagacggatgatgtcgtcgggcagggtgagggcctccgcccgttccagggccgcggcttcggggtcggacagacagatgggggcggagggcagtaccgcccgcacggcgtcgtactgggcgcggagaatacggcccaatacctcgccctgccggggcaaggtggccatggccagctcccgccggtcgaacaggtcgccgccctgggcgggcagaccgatgcgccagatgatcttttgctgcttgtgccggttgacggcgtcggcccacagccgggcatagtcgtcggcactccgggcgtagagaggagacttgccggggaccgcccggtcaaagggggcggcttccaacgggcaggggccgctttgcagccgccacaggcccatggccgcggccaggtcgtcgggggcaccctggggcagagccacaaagttgccgccgcagcgcagcagggcttcaaaagccatctcccagcccaggtcggcggggttggtgttccagccttccagcagctggccgccctcgaaactccagccccgcagggccacggaagccgccttgctggtggtgtgttcggcggtgacggcggccagttccttgcgttcaaactgctggtcgttccagaaccagaagggggtcacccccagagcggtgcggctgagatgaagcagggcgtagatggcccccagatcgtcggcggcacggatgatcatggactcgctgctttgcaggtcgatggagaactgctcgggggcaagactgcgcaccagacaaagctggatgcgcccggaagggatgaggtccccctcgttgagggtcatttccaggtcgcggcggaaccgggccaaggcccggcgcaaaggctcgctggaccactgggccgagatctccacgccccgtgtcaaaagaaattccatagcatttacatctcccggaaaaaacggccgcaccactgccggagggagccaacggaaaacaaaagggcaaacatcctcaccgcagggcggcggctgccgctttgcggttttgcagatcctttcttttctctgtggctcccgccgaaagagcggcgcgccggaatccccgccggaatcaaacagggcggtgcacagaacagggtgtgcaccggcacggcggggaaatagttctgataacaataataccatgccgcccgccccatgcgccagatacacgccccgccgccgcagacttttggcgaaaccgcacaaaagcagggacatggcttgggcagaatggcggaaacggggaggaaaagcagtttcctgtactgccgtttgggggatgttttttagtgggctgcttccgggtaggcggcagacaaggcggggggcacggctcaaggggcctgcggctccttaagaaaccccggggcaaaaagtgggtcgcgccgagaattgcctcctgcaacttgagatgaccggtcggcggggcgcgttacgtgcatcacaagatacacggtcacccggcctcccggatttgtgcgccggctaggccccgcagaccggcgcctgggggtaaggtatccaaaccgcatccaaggctcaggcgccgcaggccattgcataatggtaagggtgtctgatgtatatatcgtaccgccttttttgcctgttcatcctgtgtattacaggatttattgtctcttgttttcccttacgaccctaacgccgcggcgtttcagagatggagaaggcggtttttccgttaagaaaatgtactgtgttcatttttaggaaaaatcgacttcgacttcctctttgggggtcttgggggcgtgtagcccccgagtcgtgcggccgccgcctcgaaaccggcggcgcctttcttgcttccttctttcggcggcgaaagaaggaaggccacaaggcggatgccgtttgcccgaagcgtcgtacccaaaccacgcaacgggttacatattaaaaatcttaaataatccaaaccctgccttgcctgccgtccacccggaggccatccaccttaaaaacatcccccaaaagccagctaccccaccggaaaacaccaccccaaaacccaaaacgggcgcgccgcagagtttcccccgcggcgcgcccgccgaacttggtaaacggaaagatcttccccgccgcatggcagcatggcaaacgccaccgccgccgaggaggcgtcatgcgggcaacgaaccgcaattttgcgggaaagaccgatcgtccgcccgatattgtagcacacagcgggcaaaagcgcaagctgtacgcagttttactttgcgcagaaccgccgcagctctcccagccgggacagggtgtcagcgcggcccagctcgtacagctggcgcagctttttcacactgtgctcggtgcgggagacctccaggtccacgctgggccgcagcacaaagacgtcgccgtcagccacgccctgctccacggcggccagctcggcattgtagacctcgtgccggtgggccatggcattcacgaactcagggtattcccggtacatcatcttgaacggcagcatggacgccggtttcttgcggtatcctgccgcccgggtcagcactacgatgtttttcaaataccccatccggcggaaagcccccaggggaatgctgtccgccacgccgccgtccagcagctttttgccgcccacttccacaatgtgggagaccagcggcatggacgcgcccgcccgcaggtactccatgctgtcccctttgctcatggagtcgcagcggatgtactccgccttgcccgtctccacgttggtgcaggtgacgtaaaagggaatgcccgacgccgtaaaggcatcgtcgtcaaaggggtccagctcccagggaatgtcgtggtagcaaaactgcttgtccacaatgtccccggtggtcagcagggggtaaagccccatgaaccgcttgtccttgcggtacttttcataatagcggatgctgcgcccgtgctggcccgacagataggacaccccgtgcaccgtcccggccgatacgccgatgaccccgtccacatgaatgcccgattccaaaaaagcgtccagtacgcctgcggtgtaaagcccccgcatggcgccgccttccagcacaaggccgagtttctgctccatatccgattgttcctccgtacaccccgtatcccggtgtttcccggccctcaggccgcgggcgtcaggggcgaaaacaggcttttgtcacaggtcgccttggccccgatgttgttgtattccagatagaaatatccgctcatccaggcgtcgttgtccgcatttacaccgtaggtgtaggtcttgccgtcggacgccatgtaatcgttgccggccgtctgcaccgcaacgtcctgcttcatggccagcagatactgatagaagggcgacagcggcagccccgcctgctccaccagggtgggagccaggtcgcacaggtccatccggttcagggggtccttctcgttcacatacccggcgttttccagcgggtagttggcccagatgaaatagggggtgctgcgctccaggatctgcaggtcgttttcggggatgctctggtcggcaatgtggtccacaaagctgggcgcatggtcgcccgccatggcaatgatgaccttgcggccggtttcctcgtacacctgggtgtagtaatcgcacagctcggcgatggcctggtcgctcatgtacatgcaggaaaggaactcgtccacctcgtcgtcgtactcgccgtagtcggtggccgcatggaccagatccagggaggcatcgttcatgtcatagtcgccgtggctctggatggataccaggaaggcaaaccggggctgatcctccggcatggcctcgtacagggcggcaaagtccttgtaggtggccgagtcggtctggtagggacggttgccgtaatattcctgggtggggaaatcctcctggaaatgggtctcgtcaaagcccagggccagccaggcggaatcccggcgatagttggagttggtgtagggatgggccgccatggtggcgtagcccagttcctccagatagctgaccaggctgttggcgccgtggaggttcagccagttgaagggggtgatgctgggcatgagcatcagggagttggaggtcagcatctcgtactcgctggagttggtgccgccgcccacgtgggggctgacggtgtggcccagaatgctgttgggcaggttctggatggtggacatgtactccacgtcggtctgcagatcggtcaccagagagggatcgtagaaactctcggagaggatcaggatgacgtcggggtattcctcctccgccacttcggcggtggaacgctggtaatcggcccccagggcggcagcttcggctgcggcgtcgttggaatagccatccggcatgaggatggggtccaccagcagggaggctgcttcgatggtgccggccagatacccgtatttataataggtctcctgccatgcccagccgtaggtggccttgggcttgatgggggcggggctgaaatagccgatgtacaagatcagggcggcgcagaggaagctggccccgtaccggatgccccggcgcttccagctgatcttgacgcccttgcggggacgcaccagccaggcctgcaaagcggccatggccagcaccggcagatacagaagccccagcgtcaggacggtctggttgatgcgcagggtgtagctgcccatgacctccgccgcggtgccgatgttcaaaacgtcctggggcatgagggcggagccgtgcagctcccgggtgtagtaattggcgatggacagaatggtgaacaccgccccggcaatgccggtggcccgggaccacttgcccaggaaggcaaagagcaccagcgtcaggcagaaggcggtcagggcgttcaggggtgcgtacaccggccactgcccggccatgtagtcggcggtgacgccgtcggacagttccagctgataccgggcaatgaaagccgctgccagggcaagcaggcagggcagcacggtctgcagccagaaggtccggtcgacgatgcgggatttgagcgtttgcatgaatgttccctcttactgtggatgggtgccgcactcggtcatactgaccaaagcggcacgtgtgtttttgtgtgatacgtataaaaaagaggcgttcgcaacagcccggccctcccggaaaacaaggccgcaagatcccgtctgcaaggcggttttggcagaacttttttcctgatctcaccggcgcagcagcgaacaaccatttattatatcacgatgtgtcgaattcgtaaagaaaggaactgtgaaaaatcctgcgaaacagcggcaaaattatccaggaccccgcggcgaaggcccggcagcggcgcttttggaggggaaaacggaaaaggccgccggaagctcccggcggccatgaaagacgaagaaaaaggaggaaagatcacggttccgccctgcggttggcggcgtggaattcccggcgggccagctggggctcaaacaccagggcaaagacggtgccgctgacacaggcggagatgacgtcggccaaaggctcggcgtaaaaggctgcctgcgcccccaaaaaggcgggcaggatcagggtaaaggccacaaaactgccctttcggaagagggacagggccaaagaggtgcgggtgcgggccagagcggtcagaccgtccacccgggcgtactggaccgccagggggatgatggccagggtaaagacccgcagcccccaggcggacaggtcgatgagggaagtgtcggaggtgaaaatgcgcacgatctgcccggccagcagctggaacagggcgaacatgatgacggtaaagatcaggcacatgcgcagcacgcagcgggcggcctggcggacgcggtcgctccggcaggcgccgtagttgtagctgatgatggcctgggtgccgctgctgatgcccagcatgggtccggtgatgagggacatgcagctctggacgatggtggcgcaggcgatcagggtgtcgccctgctcggggccgccgtagtgctggagcacggcgttcatggcaatgaggatcaggctgtcggtggccatgatgaggaagggcggaaagcccatgcctgccacccggagcatcaggcggaaatcaggtcggcagaagctgatgcggatgggcggtttgcagaacaggaaccagacattgaaggcgcagctcaggaactgggacagcacggtggccaccgccgcaccggccactcccatgtccagcgcaaagatgaagatggggtccaggatgatgttggccaccgctccgatgagcacggcggccatgcccacggtgctgtacccctggcaggtgatgaaatagttgagacccaccgccatgagggcgaagaaagtgcccgccgtgtagatggtcatgtaggtgtcggcgtagacgaaggtggattcactggcgccgaaacagcggagcaacggttcccggcagatcaggaacccggcggtcagcaccgccgacagccccaccaggaacagaaaacagttgcccagcaccttgcgggcggcgcctgagtccccctcccccatgcggatggccatgaggatggaaccgcccagccccaccagagtgccgaaactgctgagcagggtgacgatgggcccgcagacgcccacgcctgccagggccaggtccccgatgccgggaatgttgccgatgtagacacggtcaatgagactgtacaacacgttgacgaactgggcgatcatggcgggcaccgcaaggcccagcaccagcttgggcaccggcccgttgcccagatcctgtctgccgcttttcataaaaccccaaaactcctttatacattttgtatataccgcaaaatacaaaacggatatgccgcaacggggcggctttccctttccgcccccgtgacacaggaagagcctgccgggacgagcaggtcccgcaggctcggcgcaaacagtatagcatccgtcccggcgggatgcaaccacccggaggaacgaaatttttgggaaagctgcacggcggaaaaaacaggaaaacgtcctttatttttttcccgccctgacccggcgtcagccccggcccagggtcagcagacggcagacatccccggcggcccggcgcagatcgtcggcggcctggggtgcggcctgggcaaagggcagggccgcccggtcacagaccgccatggcggtgacgcccaggtcgtacagggcgtcggcttccggccggatgctgcccccaaaggcaatgaccgggaccccggcggctttggcccggcgggccaccccggcaatgaccttgccctgggcggtctggctgtcgatgcagccctccccggtcaggaccaggtcggcgccctccagcatgcggtcaaagcccaccagatccagcagcatctcgatgccggggcagagactggcccccagaaaggccaccgcccccgcgcccatgccgccggcagcgcccgcaccggggaggttcgccacctccatgcccaggtcggcttccgccacggcagccagatgggcaaggcccgcatccagccgcaaaacgtcctccggggtggcgcctttctgcggcccaaagaccgccgcggcgccgttgggcccgcagaggggatttttaatgtcgcacaaaactttcagggtggccccggccagcaccggagcccggcccaacaggtcgatgtgggcgatgttctgcaaggtgtcccctaccggcacaaagctgcggccgctggaatccaggaaccgcacgcccaacgccgccgcgcagcccgcgccgccgtcgttggtggcgctgccgcccagacagagcaagatctcccgacagccgatctgcaaggcgtccaggatcatctggcccacgccgtaggtggatgcccgccccggttccagccgtcccgccgcctgggccaggggcagccccgcacaggccgccatctcaatgacggcggtgtgtttcccgggcaatatggcatagggggcgcggatttcctccccgtagggaccctgcacccggacggtgcgggtctcgcccccggccgcggccagaaacgccgccgcgctgccctctcccccgtcggccagagggacccggacctgctgggcttcgggaaaatgtcgggagaaaacctcccccagaatatggcacacctcggcggaggtcagggaacccttgaaggaatcggggaccaggatgatcttgcgcaagagggacaacgctcctttcgtggatgccgcgccgcggcagaatttctagcactaatgatacccgccccggcacaaaaaagcaacccggaacaaaatgactgccttttctggatatggggagaaaaaagaccgccgacttgccgcatggcgcggccggtcaacggtctggttttcgctatccgggaaaattaagaggtttccccgagctctttttctataagatggtttgcaagttcaaaggcctggattcttcgcttggccagtgtgatctgcggctttaacctggacgcattttcttttgcctccaaggttttgaccgtttctctcaatttgtggagggtcgagtctatctgcctttttgcttccatcaaatcttcttttgtatattccatatcggacctccacagtatccttttctgttatcggacttgccgcggcgaacagccttttgtgaattgctttgttgcgggcgccaggccaaaggggcggagcgccggggggctctcctgccgaggggactgtaccctgccctgacggcgggcaaaatgccgggcggaaagatacgcccggcagggtgtggggcgttcccggctttacccggcggcggtggtgccgtccttttcaaaggggaagccgtcccccagcaatcggtaggagtagccatcctccccgggggccagccagctcatggtgtccagatagtcggcagcgtggaaatcggtgtcctgccagaaagcgttcaggtcaccgccgttcagaaaagcgatggagtaccacagaccgtcagaccctggtaaaagataatcgtactggtgaggagggacggcagtaccctcggtcagaagataccatccggaacaccggtcctgaacatagccttccggaacagtgccctcctgacccagacagaccagcatcagcagtcggtcatagaccgtgtcgtagcaggcaaaccagtggccgccgtcctgagtggtaaagcgcagggtaaccagccattgccagttctgccgatgccccatactctgccgccagtattcggcaaaggtgttcggccagggagtgtaggaaacctccatgttttccacccgccaacccagttgaggcatcatttgctccacaaaggcgacggggttcacggtttcggcggcagctaccgccgctgcataggtgggctccaccagtgccagcgtttcttcacttaaagtggccgcttgccaggccaggtcctcgggaatttcggtgagatcagaaaagaaagggtcgcaggaccaagtggtgtccggagtacaggaaaagagataggccttaccggtgatggcgtcaaacagacagcccatgtggtagcgtccctcgttaaaaacataggaagcaatgtagagtgcgtcggcatccggccaaagctggtcgtagctgccgtagggcggcgggttggacagagcggcaaggtcctgccgggaaaagagacccagtgtcagttgagcatcggggtcccccatggattcgggggaatagccagcactggccagcagggaggcggcgttgttggcagccgtctgtttgtccatctgggggccggtaggttccagcacggccctggtgatttccccggaataaccataatccaccggcatatccgtaatccagacatagctcacgtcctcctgattttccggcaccagcaccggggcggactcgggtgtggcggcggggtcggtctccacggtgggctcgctgcccagcccggcggtgcagccggtgagggccagggctgccgtcaggaccagcagggctccccggcggcagaatgttttgcaatgcagcacggtggatcatcctttctctctgtgatgcctgtatcctaccgcggcagaatcataaagctgtttcggaggtgttgcggggttgtaaaaggtggttttacccggcggcctcggtggtgccgtccttttcaaaggggaagccatcccccagcaggcggtaggagtagccgtcctccccgggagccagccagctcatggtgtccagatagtcggcggcgtggaaatcccggtcctgtaaaaatttttccaggcctttgtcggagaggaaggtcacatcataccacaggccgtcggctccctggagcaggtaatcgtgatagggggaatcggggacggcggcgccgtcggtgagcagataccacatacagtaccggtcatggacataaccttccgggatggtgcagtcctgccccaggcagaccagttccagcagacagtcctttgcggtatcgtaccaggctgcccagcggctgccatccccggtggtgatgtccagccgggtgatccactgccattgctgccgccggcccatgctctgctgccagtattcggcaaaggtgtccggccaggaagaatagacggaggcctccaccgtctccacctgccagcccagctggggcatgagtagctccatgacggcaacagggtcgatggccttggcggcggtgaccgccgcctgatagtgcggctccacctgtgccagtgtttcctcgctgagccaggcttgctgggagagcagctcatcgggcagagggtccagcgcggaatagataggatcgttggaccagccggtgaacaggctgcaggaaatctggtaggccttgccggtgatggcgtcgaacaggcagcccaccgtgtagggtccgccgtccacaatgtaggtggccacatagagggcgtccacgtccggccacagctggtcgtagttgccgtagggcagggggatcgtcatggcggtgtaatcctgccgggagaacagtcccagcaccagctgggcgtcggggtccccaagttcctcgggggaatagcccgcgctggccagcagggaggcggcgttgttggcggctgtctgcttgtccatctggggaccggtgggttccagaacggcgctggccgtgtcctccgaaactccgtcctccttcgtcatatcccccatccaggtaaaggccacgtcctcctggttttccggcaccagtaccggggcggactcaggggtggcggcggggtcggtctccacggtaggctcgctgcccagcccggcggtgcagccggtgagggcaaaggctgccgtcaggaccagcagggctccccggcggcagaatgttttgcaatgcagcacggcggatcatcctttctctctgtgatacctgtatcctaccgcggcagaatcataaagctgtttcggaggtgttgcgggattgtaaaaggtggggcgccagccgcagggtggcggtggtcccctgccccggctggctcgtgtaggtcagttccgccccgtgggtcttggcgatggcgtagcagatggacacccccagcccggcgccgccctccgcccggctgcgggccttgtcggcgcggtagaagggacgtccgatgcgggtcagggtctcggcgtccatgccccggccgttgtcctgcaccacaaaggcggcgcgggaccccgtctgctcatagcgcagcaccacccggccgccgggtgcgcaggccttgacgccattgtcgcacaggttgaccagcaggctttccatcagatcgggctggcaggaaacgggagccgtgatgctctccggcagggggaagccttccagcgccaccccacgggcggcggccttggggccgacggcgttcagcacccggcgcatgagcatccctacagggacgtcccggaactccggctcctcgtggttcagcaccgacagccgcaaaagctgttccgacaggttcagcaggcggcggctctcaaactcgatggactcggcggcctgcatcagttcctctccccgcaggtcggccagacggatggtctgggcgtatcccccgatggcggtgaggggggtgcgcatctcgtgggaaaggtcgtccaccagggcctgtttgccgtcggcttcggcggccagctgggccagctggtcctgcacccgggcggtcatgtggttgagggtccggcccaattctcccagctcgtcccggcgggtgtccgccaccggggtgcgggcggtgtagtcccccgccgccacctggcgggcggtctcggtcaggctttggagggggcggttcatccggcgcaagaccgcgtacagccccgccgcaaacagaatgctcaccgccacgcacagcaaagtgaagagcagcgacgtctgccgccagtcggcaaaaaagtcctccatgtcggcgcaggcggtgatgatgtagccctccatggtgccgctcatgcaggtggtggcaaagatcagatggcggccctccacctcccgcacctgccagctgcgctgccccggttccagagtggacagctccggcaggctggcggcgtccaggggcagattggaaaagcagtccctgccgtccaggcggatgcttacccgcatgccgtcgcccctagcctgcatggcgtggtagacatacaaagaatccagcgccgcgggacggttttccgccacggcgggaacgtcctccgacaaacgctgcacaaacgcgcgctgtcgggcgagaaactcgtcgcagcgcgcgtcaaaactcaaccggcagctgatggtcgcgacccccagcacaccgccgaacaggcaggccaaaaacagggccagcgtcgccagatagatcgcctgccagaaatgcggggtccgcagcttctgcattccggtcccctcctttgtggatttgtggatgggtcagccccgggtgttcagccggtagcccaccttgaacaccgtctggatctccttttccagccccagctttttgcgcaggcgctggatgtgcacatccacggtgcgggtctcgccctcgtagtcgtagccccaggccagggccagcagcttttcccggctgagggccaggttgcggttgaccaccagcgcctccaaaagggcaaattcctggggcgtcagggtgacagggatgcccgcccgcagcacctggcgggcgctcaggtccactttcaggtcgcggaactcaaagcaggtggcgttgcggctggtgcgccgcagcaccgtgtccacccgggccagcagttccagcacctcaaagggcttgacgatgtaatcctccgcgcccaggcccaggccgtggagcttgtcgtccagagaagtttttgccgttacaaaaatcaccggctggttgggctgcaggcgggccttgacggcaaaaccgtcggtaccgggcagcatgacgtccagcaaaatcaggtcataggttttctgcgcggtcatttccagcgcctgatctccggtgaaggcctggtcgcaggtatgaccgaccagacgcagattggccgccatcaggttgttgatggccggggcgtcctccgcgatcaatatgcttgccattggggtatattcgcctcattcctctatctttttcacccgtgcggcggtccgtgggggacggacaacaaagccgcatactactaattataacgacagatgtatccaatttgttacaggaaccttgaaaataccttgtgagataaaagagaataccccgcaaaaacggcgaaattccccatgcacgcggggaacggttccccggcgggaaaaggaaaaatccggggagggtttctgcgcggccggaacccggcgcaaagccgttttacacatttttatattacgggcagtgttttggttgtaaaaggttttttgatatggtataacggatttgacagccgtccgcccccataacgatgcggaaaacgggggtgcgggcggatcgttttgaaaaagtgagaaggatgtgaccctccaatggaaaagaaagagaataccgcccctgtgcgcccgggcaatgataccacccgccgggccgtcaagtatgtgatctggatcgtggtgatcctgcttttgaccaacccctggctgatccccttcctgccggcttccgccaagagcatgatgacaaacgcggtgagcagcctgctgggcgacatgacccaggtttccagcgtgctgcgcttcaactgggtggcggtgatccagcttgtggtcatggtgctggtgctgcgcctggtgcacctggtgctggcggaggtcctgacccggctcaagcccaaaagcggccgcgtcagcacggtgatgacccttttgcgcagcgcccagagctacatttttgtgctcatcggcattttctggggcctgagcatcctgggcgttgacgtggctaccatgctcgccggcgtcggagtggtcgctctggtgctgggcttcggcgccgagagcctcatcgccgacgtggtcaccggtattttcatgatctttgagaacgagtacaacgtgggcgacgtcatcgaggtaggcggcttccgcggcacggtggacagcatcggcatccgcaccacctgcctgcgtgacggcggcgacaacatcaaggttttgaacaacagcgacatccgcaacctgaccaacctgtcccagcgtggcagcacggcggtgtgcgacctgcccatcccctacgaggccgacctgaaacaggcccgtgctgccctggaaaacgacctgctgccggcttttgtggaaaaccaccccgagatcttccatgaagttcccaccctgctgggcgtgcagcagctggcggacagcgcggtggtgctgcgcatcattgcggtggtggacgagaacgaccgttttgccgccgagcgctggatgcgcgaggacctcaagaccggcatggagaagtatggcatgggctgcccgtacaaccgcatcgttgtggcgcgggggtaataccggcttatgcagacgaacgacaatgaatatttccgctcggcggtcactgacgagtggaataccccccgtcccctgacggggcaggagcaggccgaggagcagaagcagcagaccttccgcacaaagcggcacaagacggcacagcgagccttttccctggcggcgccggtggccgtggtggcggtggcggccacgctggtgacgacggtggcctacacgcttaccccttgtccggtgtgcgggaaagagcggtgcaattatttttataattccaacgagatgcctgcccagatcctgtatgagggagatgtccccgccgcccagccggagacttccgatggggcggaccgcctgacctatctggactatgcctttggcggggtggagtcacaggaccagtgcatttttctggagatggacgggcagacggcgggattttccaacgatccggtatcccggcttctgtacagcaatggagtggagagttcggtcctttcgggcagcgaccatgaagatgaagagagtggcgtccgtatggtgtactactccaaccagcaggacggtgtcccagtggtttatgtggaacttgtttacctgccccagggcggaagtcccgaggagaccgagacatacggcgagacaaacctggaaaccctgtttgagcagggacaggactatacctacgcggtgaccgcctgtgaacagcccaatctttggatgcgggcatacagtacagcgccggaagtgtcggcccagcaggttctggaggcagtgggcaaaccgctggtcctgcctgtgccgggcagcaaggtggaagtaggcagttccctgtatatgacgctgccggaatcccagtatctgtggtcaagcagtataaaaagctccgcctacatctatgagtatttttatggagaggatggacacgctaccagtgaactgccggcctatgcctattcccaggggctggaagtcaccgattactactttagggatgcctcaggctccggatcggatttccgtattgagtttgcggcaagggactggaatgccgtcgcggatgcctggaatgaactgtaccggcaggctccggccaccgggcatgagccctgtgctgtgatggttcccctgcagagtatgaccgtcaacggcgtgacctatgacgtctacctggattttctgaggcatactgaagacggagagtacgatggcggcacggtccggtttgtcccccgtcagcagcccacctgccggatcaccacctatattgtcaaccaaaaaaccaccgatcccctctccctgagcggcaagagcctggaagaagtggcatatttggactcagattacagggatgtcctctccctgttctaccctgagggggcggagccaaatcccctccccgcgccggaacccagcccgacgcccacgccggaacctactcccacgccaagaccgactcccacgccggaacctacaccggatgaggaggacactcattggggaagtgctttctccaacggtacgaatatttatattcaggatggctttgcgctgctggcaccggaacgtggaatccaagtggaagcaaaggaattgacaggaacttatttcagagatggagcatcatacggatcctactccgcacaaaccatctactacgcggatgccggggaaacgcagcctttggcatgtgtggaaattctggaatggacggattccggtttgcctcagcaatcagatgtttttttctcagattactattttgattatgatgcggtgacttcctacgcggcacggtctgctacggtggacggttactggattcgggttttcagctgtacaccggatatcaccgcgcaagaaatcttggatagtacagaagaagtccctacaacgtaaaccacggccccgccgcaggaatctcttcccgcggcggggccgttttgtattcttttgactttgccgtatgcccggcttcagaaccggtccgccacaaacaccgtcgcgccggtggcgcgggcggcggcaaggccggtggaggaatcttcaaagatcatggtagtctccggtgtagcgcccaaaagctccatggcccgcagatacccctccgggtcgggcttgttgtgcataacatcctccgaggtcaggatcacctcaaaccagtcccggcagccaaaatagtccaggatctcggtggcgttctgccggctgccggtggtgaccaggcccagccgggcagtgggccgcatggcggccagcagggcaaaaagggcctcgtttttccgggcggctcccaggcaggcggagtacagctcctttttccggtcgtgcacccgttccagcagagccgggtcggggtcgccgcccatgagagggggcagaaaactcttgtaatgcccgccgttgcagcatttggcgtagtattcgtcggtgacggtaaagcccacttcctccaacgcgcggcggtagctggcggcgttcaccgtcaccgtgtcaaagagggtgccgtccaggtccaccagcacggcggcgaattgcttgttgtccataaaaacctcgtgagattcaatcgtggggataccaccgggcaatgtcgttggccaccatcagaagccccgcaaagaacatgggcgcccgcttgcggtccttggaaatcttgtagggcatcagccgcagccagtggatcagctcgtggaggaaaatgctctccacctgcctaggcgtgtaccggctttccagataggcgcgcacctcggcaaacagggcgtcgtaggcggcggaccgggtaaaggtgaactcgatgcggttctcgtgcaccgacacccggggcgtcatcatcatgaactcgtagccgccgtggaggctttgcagcagcttaccgtaatccaggaagggactttcgtgcaggttgccagtgttggggtcgatgagataccaggtatccgcccccgtgcggcagatgatgttttccagcgtcaggtcgccgtggatggtggcgacggggtcgtcggcaaacaggtcggtcaggtacttccggtcaaacagccgccccagggccggcaggcccagatagggcgcgccgttgatccacactcggtcgtactcgcacagctcccgcagaccccgggcttcccggatgcgggccagattgccgtccacctttttgtccaggtattccgccagggcggcggggtcggcggacttggcgggggtgtaaagggtcctgtccagggtggccagcacatcccgcaggatggcggcgctcttctccaccgggttggagtggagataacggaacatgctcaccgcctgggcggagtattccatgtcataccagcagcagccgggctcggcctccccgcggagaatgtggcacaggggcaggcggccctcctgggcgcggagccattccagctgcaccgccagcttgtccccgtccgccccgaaggcgtacttgcgccagaaggtccccgaatggtccatgcacagcatggtggtggcgttggaccccgccgagtggtcctccagaatggtgacgccccggttgatgcgcaaaaactgctccacaaagggtttgttctgcagcccgaaatactggctgaggaaagcgctgcggtcccgggggtccacctggggcagcaggttcaggtagtcgtcctcgtcggagggctcgggggcggcggccgccgccgcgtggttgatgccgctgcgcattttgtcgggcagcagggtcaccgcccacatgacgagcagcggcagaatataccaggccagcatcatgccctgggcaaggggcgcgctgtcgtggagctgcccggtcagggaaaagctggtcacgtccacggcgtcccggccaaagagcatggtgaatacctccaccatgccgaaatcggcgcccagcagggaaaggccctccaccagaacccggtaggacgccagataggacgcccacatgagggcggtgttcaacgccagacgggacagccgtacccggcccaggtccttgaaggtgttgatgaggctccagcaaaagaccaggccgtccagcttgagggtgtcgttgaagatgccgcagaccttcaggcacagccgcttgatggggccccgcagccggatgaccagcaccagggccacggccagggcggcggaaaaggcaaggtaatagcgggtctcatccgcgacgccggaggcgccggtgagccggaagatgccgaaaatcagcgtcaccagccagacgtccaaaaaccggtccatgatgacggtggccagggcaaagcccaccccgtttttcattttgcggccggtgaaccaggcgcggaaaatatcgccgatgtgaaagggcaaaagaaagttgacggcgtagccccccgccatgccccgcagcatggcgccccgcatgggccgctcatagatgcggatgaactgctcccaccgcaaaatgcggaacaggtgacccaggagcagcagcaagaccgacgccagcagcaacaaaacagcggtcattggtccagcgcctcaaatcctgcggtattttccggctgttccgccagggcgtactcggcgggggtgccgaagggcaggtgcaggtcggtggcaaagccgcggaccaccttgccctccccggccagcacgttgtacacgccggaaacaaagaattccttgtactggcagacggtgagatatttggcgcaggcctccagataggtggccttgtccttgaaatagtaggccccgcagatggcgtcatggctgacgacctctttttccaccgtgcggcggaccagaccgtcctccccgtactgcaggtagctgtacgccggggagtcggaggcaaaggtcagcagtgccccgtcaggccctgcggcaaagttgccttcccggcagaagtcgtcaaaggcggagcagaggaagagatggtcgcagtcgttgaagagcaccggcacaccgtcgggcaggtcctcgcagcctttctggcaggtgaccgccgccccgggggtcacgtcgtccagggcgacgatgcgggcgtcgggccagtattcccggatgcggcgctcgatgtcaaagtcccgcagatgctctttcagcaccacaaaggtgatgccgtccagctcgatgtttttctcgatgctgcgggccgcccagtagaaaaagggcttgccgtggatctcgatcagggttttggggcagacaaagccgttttcaaaaaagcggctgccccgcccggccatgggcatgacaaggtgtagcttggacatggggtagatcactcctttgcggctgcggcgtcccgggcggccagcatggcgcactcggcctcaatgacacgggccaggccctcctcaatggagacctggggctgccagccgtacagttctttggcgtgggcgttgtcgcacagggaatacttgttgacctcgtggtcgagaatttcggggcggatgccgtaggcgccgccgtacagttccgggtacttggcccagtagtgggcggtatcccagtatttggcctcgatgtccttgtgcatcaggcggcaggcgatggcgtacagctcccgcaccgagtagttggcgttgctggacacgttgacggcgtcaaagcccttgcgctcggtgacccgcagggccaggtcgatgaggtcatccacgtagatgtaatcccggcgctggttgccgtcggagtggaactcggggacccggtcgtagtacagttcccggatcatgtagcccacaaagggcggctgcttgcgcaggcagtcgatgtgggggccgtagacgttggcaaagcgcaggcaggtgacgttcatgttgtaggtgtcggcaaagctgcggcagaactgctcgccgcagtatttggtgttggggtaaatgagagtgggaggattgaacttgtcctccacggtggggaactcggtctcgttttcatacatggcgttggtggacgcctggaccagatgcttcacgccggtgcggcggcagagttccagcaggttcacaaggcccatggtatttaccgacacggcctccaccgggtcgctctggcagtcgggcaggggcgcgatgccggcgatgttgtacaccacgtcaaaatgctcccgctcaaacagggcgggcagttcctcccggtcgcggatgtccatgcgcagcacatcggcggcgaagtcgtggtcgtcgaagtggaggttgtccaggttgccgtaggagaaattgtcgatgccgatgacggtatcgccccgcttccacagggcatggcagagctggccgccgatgaagccggcggcgccggtgacgagaactttcataaagggcctccttttatcagaacgggcaaagggtcacagattggatgcgaccacctgatagctgtaatcgtcgatgatcttcgagcgcatttcctgctccacaaactttttatggccggtcaggtactggccgcacatgcgcagcaggctcatgccgaagctggtcagcttggtgttggacacctggtcctcctcccgccagctgatggggaaaaacagcatcttctgcttgtaatggcactgggccaggatcatgcagtcgttgaaatacaaagtatccgggaacttgatatagtagcggtttttcagggatgccactcggtagaggttcagcccgctgcccaggtcggtgatcttgtgcagggtcaccaggctgaacagccagttgaaaccgtagttgccgaagatgcgcagggcgctgtaccccttgatgcggctgccccgcatgaagcgggaacccaggcagcagtcgtattgtttatattcgccggacttgaccaggggcagaagatcccgcacgtccccctggtcgtctccgtgcagcaccaccagatagtcatatccgtgctccatggcatagccgaaagccaccttatggctgccgcccaggccgtagttctggtcgttgcgcaaaaggcgcaccggggcgtcggggtgggcggccatccagacctttaccgcgtcctcggtgccgtcggtggaacggttgttcaccacgatgcactcccccgcgaattcccggacctgggggtccagaagctgatccagcacccgggggacctggttctcacagttgtaggccggaataaaaatcaaaaatttctgctccaaggcaaaagcctccctttgtcaggatgcaccgggcggcccaaaagccccccaatcttttatatgataccacatcccgaaccgtttgtcagcgcataaaaaactccccagcagccgttttttttgctgcgggggagaaatggtgccggcatgggagcgggagcgtcagtgcgccaccgtcaaaacttccaaggaagcgctgccatactgcaccgtttgccggtcggtgatggtaaaattctcttccagccactggtggaactcgtccaggtcgcggaggcagtcgtcgttgtagataatgatgtccggttctttctccggcagttccagatagtagctggcaaaccggctgtcactgtcagtagaggaaatgaccgatgcctgagcggtctccagggtaccgtccgccatcaaaaaggccaggccgtccacgttaccggtggaaagcagcacctttttgcccgcgcaggggtccagggcgcgctccagggcatagtacatatcggcggcctcggtgtcggcccaggtcccggcggcggggccgctggacaggtaggagagatcggtgtccagcatgttggccggacgccatcctgtaattagcaacaggaacattcgggaaacgaccataaaagtaagaaaaagaaggagaatcccgtcagaccaatcgatgtcaatggcgtagggggtacaagagttgacgtcgccgtcttcagcggcccgggtctgcaaggccagggcaagcacggcgcacaccgccggccaagttaggtacataaatgttgtgtggaaagaaataagagtagaccgtagaattaacagataagcaaataccccgggcaggtaacccaaccagaacagttctgaccgggtagttcctttgctggagcggaaaaaccacagtcctgatatagttaataccagacagaaataccgttcgtccagactggaatcccgcagggcgcggaccaggcataaaagcaatgtgatggcggaaaacagggcaaacagaatattcagccaatagcggatgttgcggatgggccgctcacgccgtagagagatatcccgaacaatccctacacatacgatgaccagcgcgacacctagaggtttggcaataaataatcctatgttgatagcctggctgcccaaaagggccaggcgctcggcaaaggtgaagtcatactgggggtcgttgaggataagggtggcccgggaaatcagcgtccgcagggacatatcctgcaggacatacacaaggaaaaccccggcgcaggccacgcaggtcagaaaggtgaccagcatgccggcgggcaggcccaggacgcgcttttccccggcgcggcggcccagcaggaacatcccgaagagatagaccggggcggcaaaggcgctttgggggaaggccagcacgctgagactgaggaaaatgccccccggcaccagccgccacagttttttgcagccgtccgcataatagccgtaaaagcagaggaaggccgccagggtaaagtggaactgctgggagatgtaatccggcgccaaaaaccatttgggggtgtagacaaacagggccagggcggcaagaaaagcggtgcgcggggtgagagtgcggcgcatggtgcggtaaaaccagatggaaagcagggctttcagcaccagggtgacgatgcgcatatacagcaaaatgccggtggtggtgccggtgatggcccagtacggccacatgagggcggcgtccgccagggcggaaagctgatgaggctcccacatggtgtagaacagggtatccccctggatcagccgccagcccagggacagagcgtattcctcgtcgatctcaaggcccacaaagagcgttttgaccaccgaggccgccgccagcaagatcagcagcgctgccaggatctgctcggggccgatatgtcgtttggttaactgcatgagttttcctccttttggatatggatgtcaggggttatgcccggccttgtaccggggcaggtgtttgagcagcagggtgtcccgcacagccagggcaaagggcaggtagttctggcagaaagcatcccacttgcgggccacaaagcccagttccggctttttgcccttgacggcggtcatgtcgatccacttggatttgtcccgcaccgtaattttttgctcaaaggggatgtgccagccctccgggtaccagtaggccggggtgagcagacggtattcggcggggtccagctcggcaacgtagcggttgagctggctctcgtcatgccacagggcaatgacgccgtcggccaggtcgtcgtcggtgcgcttggccagggtgtggcacagggccaggaaggccggggccgtgccgccgttcaggcccccggacacatagtcccgcccgcagttgtaggggatgtaggcccggcatttggggttgcggtcgtaggagtaaaagggcggtgtcttgtcccagaagcccggctgctggaccatcagcagcacctccccctgttcggtgcggggcagaaattcctccgccgtcaccacctgctggcacagcaggttggcgttggcaaaaaacaggaagtcaaaggctttcagggcatcctcctgggtcaggaacatctcgaaccgcttgagggtgctgtacggccagtccagggctttctggtaaatgcggcgcacgtcgggttcggtgtcgaactcgatggacggcgcgtcggtaaagacaaaaaaggttttatcacactcgggcagaaaattctgccggaacgtcttgtaaaagtccggccagaacaccgtgtatttgccggtgcagatgtacaaaagggccaccgtgggcttggacatggcgggtcagacctccttccgacgggcggcgatgcgctgccacagctggagggcgcggccgcgcaggtattcggcgtcgctggtaaagccgtaaaagacaaggttcatggcgttgggcaggatgcacaccaccaccgcccgggcaatgatgcccagccagccggtgcccagcaggctgcatacccaccaggtcagggccatttccaccgccagggtgagggcatggacaagctggatgcgcacataccgtccgccgcagccccgcatgaaccggcggaacaccaccttggcccggccaaaccacatgaggcagtgggcgaacacggtggcggcgatgacgccgggcaggccgaagggaatgaccagcacaaagctcagtaccaggttggagacgccgctggccaccatgaaccactggtcctcctcaaaatggcccagcacggcccggtaggagcccagcatccggtggttccagcccacgtactcgtttaagcagaaccagaacacgtaggacatgggcagtagccacttgctgcccagccataccgtgatgaagggctggaacaggcagaagtaggccaccgccacaaagctgccgaaaagatagctgaacaggtccatgctccagaacacctttttctggtggtcgtcggcctcggcggtcttgtcgtagacgatgttgccgatggcggcggcaaagctgtccaggatcttgttgccgatgttggtcaccgaggaggaaacgttggagtagttgcccagataggtgacgctggcggcgccccgcatgcgggtcatgaccaggctgtccgaggtgccgtagatggcgttggatacccggtgcaccagataataccgcagatcccggaacagccccaggtccttgaagtccgaccaggagacccggacgtcgtggacttcggggaaatcccggcggtagcgccaggccaccaccacgtttgccagcgtgttgaaaacgatggtgatgccaaaatacagaatgtagttgtttgcgtaatttaacgaaatgtaaatcctcgccagataggtgagaacgttaaagacaaagtcgatgcgggtgcagacatagccttgctgggtgcaggtgtacagcaggcgccgggtgaccaggaaatagctggacagggtggacagcgtctgcaaaatgtagatggcgtggacggtgccccagtcggtgccggggtccacaatgagcaggggcaggaaaaaccagaagatggccgccagcacaaagatggccgcgccgatgagacggtaggtccacttgtacagcgacatgtacttgctgatcttgtccacgtccttggcggcgatctgctcatacaggcggtagctgatgacgctgcccacgccgaactcggcgatggaaaagacgctgaacagctgctcgatgacggtggaagtaccggggatggaaatgtcgaagttggagacgaacagcgcccgggccacaagccccagcagcaaaagcacaaagctggaacccagggtgtacatcaggttgatgatggtgcgtttggtcctcatggacagaagccctttcctgtgagagagtttggtctgtttgcgggaaatgccggtcttacggcaaaaagatggttctcggtcatttcggccgcgcccctgtcccggcggaaaaccgggggccgcgggccttacggcccggcggggcagagggggcgtcctgcacgcccggcgggcaaaggccgggcggcgggtaaaaaagccggagccgggaaatcagccctttttcagatgcccgcagaaccacagggcaaaccttgccccaaagactttgagcagcaggcggaagagcacccagtccgcccggccccggcactggtcgccgtagtcgtacagcgggcggcactggtcgataagaggggcgcaggcacggcgcacggccttgtccttgcaggcggcggcacgggcttccggccagaaagcgttggcggtgcggcgcagaatttcattgcgctgggcgggcaggcactcgccttccgcaaaaacctgggcaaagccccgcagcgccgccaggatgccggtgaaatgcttggggaggtttgagttcatcaggctgccggcacggttttcccggtaatgggtcatgaccatgtcgatgaagcagagcttgctgcaatggcgcagaagcaaaaggtcgaaggggtaatcctccgcccagaccaccgacggccagaactccaccccgctgtccagcaaaaactgacgtttcaggcagaatttccacaccgaccagtgggcgctgtcgtacagccgtttgacccgggcggcgtagtcgtcgctctcaaacgcgccggggacaaagtcgatggcggagggggcgcgcagggtgccgtccgcctcgtccagggataagtaccgggccacataccagtcaaagccggggttggcgtccagggcggcgcgcaggttttgcagcatgccgggggcccattcgtcgtcgctgtccagaaacagcagccactcccccgtcgccgcggcaatgccggtgttgcgcgccccggccaggccctggtttttctggtgcagggcaatgaccccgggacattccgccgcaaaggcgtcgcacatggcccctgaggtatcggtggagccgtcgtccaccaggatgcactcccagtcggggtcccctgcctgctccaccacgcttttcacgcacaggggcaggtatttttccacgttatacaccggcacgaccaccgaaaaccggatcttgccttcccgccgcatggcggcacctcctgtccttgtgttgtccgttgttttaccgcccggcagtggacaccagcgtccagccgggcagatagagttcgctttccttgccgttggcgtaccagcggtcgggggcgtagacctgtttgtcgggggcatcccccaggtactgcgcccaccagctgtaggtcgagttgctgatgatgaaatgccggcacagctgcatcagggctaggtcccccgccgcgctgcccggtgtcaggtagacggcgggcaggcccgccgtgtccagatgatcctgcgcccagaggatgtcgtcggaaaagacaaagagggtcgcttccggccactgttctttcaccagagcgcagcaccgggcgtagtagtccggggtgcagacctgcagggcggcgttttcggggttctggtagtccccccggcgcagatgcaggcagacggggcagcttgccgccccgatggccgccgcccggtcggggtcgggggcatttaccgggcgcagttccgcccggatgatgtccttgtggtcggcaaagtaggcttcgctctggaaatacccccaggccagaaggtccggcgggaaatgcaggcccttgccccggcggcagggtacatagccgtcggtgacgaagtgcagacccagggcgttgagcacgggggccatttttgcttcaaagggctgccagttccgggccatcatgccgcccttctgttcccggcggatcatgaggactttcagggtgttctgcaggggcagatgccgcttggcaaagcccccgtcggctttgatgtgtacctccggggcgatgcgcagctctttcagggcgcagagggtgtgggcgggggcgccggacttccagtcctcccggtccagcagggtcacttcctcccccgtgcgcagggccagcgcccgggcaaaggcgtagaggaacatctggttgcccagtcccccggtcagttcggcgtagatcacggggcggcctcctttcggggcgccgcggcggggacaagggcgtcgtacagcgcttccatccggcgggcggcggctttcagctcatacccggcggcttccagtttgtcccagcggctctggtgtaccccgcagtcggcaatgcgccgggcggtgcccgcccaggtttcaaagggggcggacaggggcaggaattccaccagccccgtcaccgagccgtcggcgggaacgttggtggaggcaagacagggtacgccgcagccctgggcctccaccagagtgaccgggctgccctcaaactcgctgggcagcaagaacaggtcaaaggcattcataaaggcggggacgttgtcctgcacccccgtctggatgacggcgtcggacaggcccagggcgtcgatcttggtgtccacggcgggcttgtcctctcccccgcccaccagcatcagtttccaggctgggtcggcggcgcgcatggccgcgaaaatatccaaaagatagagcaggtttttctggtggttgtaccgccccacaaagcccgccagcttttcggtgtcggccacgccgtaccgggcgcggatgtccgcccgggatgcgccgtcggggaaaaagcggtgcttgtccaccgcgttgcaggccaccgcaaagttgggcttttggtcaatgtggtcgccgaacacgaaccgccccgccgccacgctgcatcccaggaagtagtccgcccagcgctggtagaaccggtgggcgatctgccagctcagggtcatgggcgggtagacgatgtggctgtgcacaatgagtttcgcccccgggcaggcgtggcggatgaccccgcaggccagggcgttgaccttgctggtggtatggaaatggacgatgtcgtaatccttgtgctggcgaaagaagccgggatagaaaaacagccgctgcttgtcgttgccgggcatccagtagatgtgcttgaccccggcggcgcgcagggcgtcctccccgctgggcacgccctcgggcgcgcgagtggccagcaggtcgacctcgtagcgggcaaggtccatggaccccagcaggttcaggatataccgctggatgccgccgttgacggtcagggcgctgccgatcatcagaatgcgcatgggggtgctcctttcctgtaaattgtggtgcgggcggcttaccagtagctgccgccctccacggcatccttgttgcggatgccctcgctgtcgccggggcggacccaggcgtcgttgtacagccgggacaaaatggggtggtcgtcccacctcttgccccggatgccgaagagcagctgggtggcgcctgccatctgcaccgcctgggcgttcagttcccgggcgcagaaggccgccagaggcaggccgtaggctcccgccccgatgaccgccacgtcaaaaggctccttggcaatttcctcctccatggcggccagggcgtcgaaccagctgtggtagccggtctcctgcccgcccagaccctgcacggccttcaccacccgcagggaggcaaattccggcagcacgtcggggttctggaagagctgctcccggcgggcgtactggctctggatggtgtccgcaaagggatggaccaccaatacccgcttgcccgccagcgccgccgaccagggcgacgcatgatagtaaggctccagcgaccgcagcttggcaaagcgggtctcgggaccgcagccctttatgacctcccgctcggctcccacgtcccacaaggccagcaggtcggtggcgtgggcggcttcggcgtaaagcttgcaaaagcgctccagggtggcgtcgtcggtggggaacatgccggacaggtcccgcatctcggcgcggatcttcggggagaaatgctcgctctcctccgtctggtttttcaggtattcggccatgcagcgcatttcggtggcgccgcagcgcccggcgcagaaaggccgtccccagcggatgcactgggcaatgtaatcgttgccggcttcggcgtccatgagctccacgccacggtaccgccagccgaaccgcagacctttgtacaggtcccgggctttctgcaaaattttggcgtcgttatccatgggcgggcactcccctcttttccagcatggcaagggcggtctcggcgctgttgccccacaggaactgttcgttcacccggcgctgagcggcaacgcccatctcggggtcggcggcggcccggcgcacggcgtcgggcagagcctcgtcggtgtcggccagcacgccggacaccccgtcctcaatgatgagctccggccccggcgcacggcgggcggcggggggacagcccgcatacatggcttccagcaggctcatgccgaaaatttcatggtcgttcaggttgacaaagacgtcgcaggcgtggtagtaggcatgcaccgccgtgttgggcagggcggggatgcgggtatagcggtcgccgtaaggcttcatggcggcgtccagctcctcggcctgggaacctttgccaatgacgataaggtgccattcctcccccagctgtttcatcaggggcggcagggccatgggccgtttgtaggggtccagccgtcccacgaacagcagataccgggcggcggggtccagcttcagctcggcccggatctcggcggcagagccggggatcatgggaatgatggcggtgtccagacccaccggcatgaccccggcgcaggacacccccatgctctcgatctcacgggccacggcgggggtcttggcataggtgggggtgcggcggtatacggcgaggttccggcgcagaagcaggtccatcaccagccggacggcaggggtgcgggaatcgctcttcagcgcgcccagctggctgtaaaagaagatgccgtgcttctggcagaagcggtacagccccggcacgcccagggagttgtcccccatgacgtggacggcatccaccccctcgtccagcaggggctgccagcttttgtaaaaggcgtggacggccagggcgcgggcgggcagatagagaacccggacattcggctccaggtcctcggcctcgggggcggagagggaggtgtcggggtaaatggcaagggcgcggcagcccagggcggcaaaggcccgggccaggcccacctcctgccggttgtaggcgccctttcggccggacgcaccgcagtacagctgcgggatggcaatggtcagcatgaaagcctcctgaatggggtaaaacacaaaacgcgaaaagacgcgaaaaatccgatgttcagccctctgcttccgggctgccgggggcggcgggcttgtcgcctgcaccggctgccccggcgttggcggcgggggcgggctgtttgggcaggcgggtgagatagcgggcgtcgatgacctcaaaccggtcgtcccggcagtaggtatggatgcccaccacgtcggcgcggttcagcccggtgatggcgacgatgtggggttccgccgcacagagagggatctcgctggccccgcggcgggcgaaaaattgcaggtagacgccgtagtccaccttggtgctcacctgggtggggtggacggtctggccgccgatctcaaacatggggccggcgttgcggaagcccaggccgtattcccggtgctggaggttgaaaggctcgtccggttccagctcaaaatccgggccgtcctcccccgcggcgtggcgcaggatgtagcggcggtagcgggtgtaaagctgattttccggtttggtctcgctgcaaagcaacgtcacttcgtcggattttttgtccagcagaatggtgtcgcacagctcgcaccccaccgggaagcgggcggcctgctcccacttgccgggaaattccgcgcagcggtacaggtcgatggtgtggcaggcgctggactcggggatcatccaggtctccccccgccagtcaaagacggtgggaaaggacagatggctccccgtttgcagcacgatctgcggcgtgccgaaactgccgtcctcccgcagagggatggcggcaatgtctccccgcccggcggccaggtcaaaggcctcgcagaagatccagcgctcgtccccgtgacggtagagcagagggtcggcgtaccaggtatgcccgtcaaagggcaggggggtgtaggcaccctcccccaaagcgggcagaggagcctcggcagggatgggccggacggcgatggtgtagatctccttttgtccggtgagttttttgaaaagacggtccggcggcatgtgcagcgcgcggtacacctgattcataggggcgtctccttgttgtcgatggtgcgtggtttctctatatattaaggtaggggtcagcgggcagcgtccccggcggatacccgggcgtagatgtccgccagacggcggtagttttcctcattgccgtccccggtcttttccagggcggcccggcggatggcgtgggggtccatctccgccagagcggcgggcagcgcccgcaccgcccttgccaggtcggcggcgtccccgggggcaaaggtcaggccgtcaaagcccgccgtcaccgaggctcccacgttgcccagggcgctggcaatgaccggcgttcccaccagatgggcctccgacggcaccagggcaaaactctcatagcaaaggctggcagccaccacggccaggctttccgccatgcgggcgtggagttctttggcaggcagccgccccgcaaattcaacattgggcagggcctgttccctggcccagctttccagcgggccgtcccccaccagcagcagccggggagcgtcggggtcgccggccagcagccgccaggcttccagcacggtgcgcagacctttcagttcctccagccgcccggcatagacgatctggtttttccgcgttccaaagggcaaaggcgccccctgaggcagagtgacggacaccgggttgggcttgacgtacagccgcgccgggtcaaataccgggcgcagggcgttgaattccagcagcttgtcccggtcaaactcggtgggagtgatgagggacacctttttgtaggtccccaaaagccggtgaaaggcgtataccgccgcgcagaccaggctctccgcccggctgccccggtaacaggcatggcgcacggcgcagaacaggctttggtgggggcagtcctcgcagacttcgccctggcgcagcaataccccgttggggcagaacagccggaagttgtgcagcgtctggaccacgggaactccctctttccggcaggccagaagcaccgaggggctggtcaccagcagggtattatgcacgtggaccagctcgatccggttctgacggatcagcgcccggacttccctcatggccttgaagctgaataccgcccggaacggcagcagcagcttctgcaaaaggccggcagcttccccgttgctgcgctcgtagacggtgacggtgtggccgtgctgctccagcatggcgcgctcggcttcaaacacggcgtcctcgcccccgggcaggcggtagcgggtgtggatcagcaggatgcgccggggcagcggcgcgggggtcggctgaggcatggccgggggctcctttctgtaaaaatccgtcggcatcccgctcttcccggaaagggaccgggcgggcatggcggcgggaacatcccccgccgtctcttatccgtttattataccctttcattgtataaaagaaaagccctgaccccggacaccccctcccccgttgggccgacaaagggtttgtgaagattttgttgaacttgcacaaattttacaaagatttatgggcaggtcgaaaccacttaagtcgcatttttgcccacttgtgaaaaaccggttgttattttgtggccgaaatgttaaattgtaaatagttatcatccgtgaatgtgcacagcagccgccgtggtgttgtgcaaaaaaaacagcatattgcgcaccgggcagggcgcaggttaggagatggagcatgcgtaacaggatttctctgaataaaggttggactttctgcggccctgaccgtaccgagatcgccgtggacgttccccatacctggaacgccatcgacggccaggacggcggcaacgactactggcgcggcagctgcacgtacacccgcagctttgaccgccccgactttgaccccgccacccaggtggtctacctggaattccagggcgtcaacgcttcggcggacgtgaccctcaacgggcagaaggtcgcccaccatgacggcggctactccaccttccgggcggacgtcaccgccctgctggccgacaagaacgacctgaccgtggtggccgacaacagcaagaacgaccgcgtctatccccagaaggcggacttcaccttctacggcggcatctaccgcgacgtggacctcatcgtggtcagcaaggagcactttgatctggaccacttcggcggccccggcctgaaagtcacccccaccgtggagggcaaggacggcagcgtccatgtggaatgctgggccaatgtggaaaaccccgacgtcaccgtcaccctcaccgatgcggacggcaagaccgtggcttccggcaagggcgccgacgtgaccctgaccattcccaaggttcatctgtgggacggcgtggaggacccctacctctacaccgctaccctgcagctcaataaagacggccaggccgtggacgagatcagctgccgtttcggcgtgcgcagcttccgcgtggaccccaaggagggcttcttcctcaacggccgcaagtatcccctgcacggcgtctcccgccatcaggaccgcaagggcatcggcaacgccctgaccaaggaaatgcacaaggaggacatggacctgatccgcgagatcggcgccaacaccatccgccttgcccactaccagcacgaccagtacttctacgacctgtgcgacgagtacggcatgatcgtctgggccgagatcccctacatctcggagcatatgcccaacggccgcgagaacaccatcagccagatgaaagagctgatcgttcagaactacaatcacccctccatcgtctgctggggcgtttccaacgagatcaccatctccaccaaggacaaggccgacatgctggataaccaccgcgtgctcaacgacctctgccatgagatggacaagacccgccccaccaccctggcctgctacgccatgtgcggcccctttaataaggtagcccacatcaccgacctggtcagctggaacctctacctgggctggtacgtcccgggcctgttcctcaacgacctgtggatcgatttcttccacctgtgctaccccaaccgctgcctgggctactccgagtacggctgcgaggccatgcccaacctgcactcctccaagccccgccgcggcgaccataccgaggaatatcaggccgtctatcacgagtacatgctcaagtgctttgagcgtcatccctatatgtggtccacccacgtgtggaacatgttcgactttgcggccgacgcccgtgaacagggcggcgaacccggcatgaaccacaagggcctggtcaccttcgaccgcaagaccaagaaagattccttctacgcctataaggcattctggagcaaggacccgttcgtccatatctgcggcaagcgctttgccgaccgcaccggcgacaccaccaccgtcaaggtctactccaaccagccggaagtttcgctgtatgtggacggcaagctggtggagaccaagaaagaggacaagatcttcaccttccaggtaagcctgtcccccgagaccaagctggaagccgtggcaggcccctgccgcgacgccgccaccctgcataaggtggacacccccaaccccgcctataaactcaccgccaagagcagcaacagtgcaaactgggtttgatggcgccgagcgatcatatcgcgagtctgcgcgaagcgcaggccatcaacgaccggagcgatgagcgagggcgttccactgatgtgcgtcgccgtaaaggcgacgcttgagggacgccacgggccagcgcggagcacgatgccgttaacgaccggagcggaaagcgaggtcgttcccctgctttcatcgccggacaggcgatgtttgggggacgtgagaaacctggcgcgcagcgcaggccatcaacgaccggagcgatgagcgactggcgcccgcaggcgccgtttcgtaggccaaccgccgcgcaggcggcggcacttgggccggagatggtcgttcccctgctgtgcgtcgccgaacaggcggcgcttgagggacgccacgggccagcgcgcagcgcaatgcccgccaacgccccctcgctctccgcacgttcctttcccctgttttccatcgcccaccgggcgatgtttggcgggtgtaagaaaaccgccgaagaagcaatgtaataaagatgccgttctccggccggggtgatgtccggccggcggcaaggcccacggggccgtgatccgtggaagggaggcgcccgcatcgcccaaagtcatgcgggcaggtcgctccctgcggactatgtttatccctgccggtggccgacagccgacaggataaaaatatgatgtatggaagagaggacaaaacatgcagaagaagccgaaagtaacattgtggtcagtcctgactgcactgtgcgctattctgacggccgcagctctggttgcgactttcgtcgtggcgcccatgtacgagaccaccatcaacgttgctctggatgccgatacctatcggatcatcaagggcgacaccgatgaggacaccaactacttcaccagcgattttgcttccgatgaggagcgcgagtcttatgaagaagagctctgcgctaccgtcgaggccgagggtgctgcgctgctgatgaacaacaacaacgcactgcccctggccagcggcgccaaggtcagcctgttcgcccgcggttccgtcgacctgatgtacggcggcaccggttccggcgcggttgacacttcctccgctcccaccctcaaggacgctctggaagcccagggcatccaggtcaaccagaccctgtgggactggtacagctctgaggagatcgcctccaagtacagccgcgtgacccccagcgccatctccgacgctctggctgccaacagcgagtacgctgtcaacgaggctccctggtctgaggtggaaagcgccaactcctccagctttgccgagtacggcgacgctgccatcgtcgtgttctcccgctccggcggcgagggcgctgacctgcccagcggcgacaacggctccggtgtggaatggaccggcgacaccaactatctggaactctcccaggaggagaaggacctgctggccggcctcaaggccctgaaagatgcaggcaccttcaagagcattgtcgtgctgctcaacacctccaatgccatcgagctggacttcctcaaccccgagatctgcggcgtggactacggcattgacgcctgcctgtggatcggcgacgtcggccagaccggcgccaacggtgtcggccagctgctggccggcgctgccaacccctccggcagcatcgtcgataccttctggtacgacaacctggccaaccccgctgtcaccaacttctactcccgcccctactccaacaatgacgagtacggtctggtcgccgacgacaaggacaacggcaaccagggctactacgtcgtttaccaggaaggcatctacctgggctaccgctacaccgagacccgttacgaggactacgtcatgggcaccggcaatgcgggtgacttcaactacggcaccactgttgcctatcccttcggctacggcagcagctacaccacctttgcttactccgactttgctgtgaccgagactgcggaaggctttgagctgaccgtcaccgtcaccaacaccggcagcgtggccggcaagaagaccgtccaggtctacttccagagcccctacaccgattacgacaagcagaacggcatcgagaaggccagcgttgagctgtgcggcttcgacaagaccgaggtcctggagcccggcgcttccgagaccgtgaccatcgccatcgacaagagcgagctgcgcacctacgatgccaacggcgccaagacctacatcctggatgccggcgactactacttcaccatcggcaacggcgcccatgaggctgtcaacaacatcctggccgccaagggctacacccccgagtccaccgccaaccgcatggatgccgcgggcgacgccactctgacctacaagtggaccaacgctgctctcgacaccaccaccttcgccaccagcgaatccaccggcaacgccatcaccaacctgttcgacgacgccgaccccaacaaggtcagctactctcccggcagcgtgacctggctcagccgttccgactggaccgctacctaccccaccggcacctttgactttgccctgaacgacgagctggtcgccgctctggccaacacccactacgatggcagcctggctgacagcgtcgagatgcccaccctgggcgccgacggcgacctgaccctggcttccatgatcggcgccgactacgacgatccccagtgggacagcctgctggatcagatgaccttcgatgagatgaatctgatgatcacccagggcttccacaacaccaaggcggctgcctccatcggcaagaccgctaccaaggacgagaacggcccgcagggcctgaccgcggctctgaccggcggcgcttccgccatgtgctacacctccgaggacgtcatggccgccaccttcaaccgtgagctcatcaacgacgtcggccgctgcatcggcgaggactgcctggccatgggttactccggcctgtacggccccggcatcaacatgcaccgcaccgcttactccggccgtaacttcgagtactactccgaagatcccttcatcgccggcgagatctgcgccgttgaggtccagggcatccagtccaagggcgtttacgtctacctgaagcacgttgccctcaacgactccgagtccagccgtatgggcgttgccacctggatcaacgagcaggctgcccgtgaggtctacctggaagttgccgacaaggcggtcatcgacggcggcgcatggtgcaccatgtccggcttcaaccgctggggcgctacctggtgcggcaagtacgagaacctgcagaccggcttcctgcgcgatgaactgggtatgcgcggcatgtccatcaccgactactccggcggcagccactacatggattccaccgacgctctgatcgccggcaccgagatctgggacagccccaccccgctgcacaccgagatcctggccaactacgagaacgacgcctacatcgtcaccgagatgcgtgaggccgttcacaagatcctgtacaccgtcgtcaactccaacgccatgaacggctggtcttctgccgaccgtctggaagtcatcatcccgtggtggaagctggccgcctacgctctgtgcgctgtgctggctgtgctgaccgtcgtctgcggcctgatgctcaagggcgctctgaaaaagaagaagcaggccaaacaggcgtaacttctgacttccgcgcgcaccgcgggtgcgcatgactactggaacaggcgggcgtctgtccgctggaataaacaaaacatcctgatgccgtccccgtccctgtaacaagggacggggatatcagaaggatgggaaggagcgatttttttccatgagtaatgaacccaagcagggtgggcagtccgccaagcttaaccgcgccaagccgtaccagttggtcctgttccccttcaacaacggtgcgaccaatgtctactacatcctgacctcggcctacatcgcctactacggcggtgttctgggtctggcggtcgtctttgccagcacgatggtcacggtcatgcgtctgttcgacgctgtcaccgaccccatcatcggcgcattgatggacaagaccaacggcaagttcggtaagttccgtcccttcatgctgatcggcaacatcatcatgatcatcagctcgatcctgctgtacttctgcacgcagttcgtgcccgcgaccatgatgccgctgcgctacgtgctgtacgttgtgttctatgcgatctacgtcatcggctacaccttccagacttcggtcacccgtgccggccagaccgttctgaccaacgatcccaagcagcgcccgctgttcaccgttttcaacctggtggccagcatgatcggcatgggcgccattcagttcctggctcccatcctgcgcgccaacgtgggtgactacaccacccaggacttcttcaactacatgatccccattgccatcgtcatctcctttgctctgacgatcctggcaatgatcggtatctgggagaaggaccgtcccgagtacttcggcatcggcggcgaaaagaccgaaaaggtcaagctcagccagtatgtcgacctgctcaagtccaaccgtcccctgcagcgcctgatggttgccggcgccggctgcaagctggctctggccattgccaccaacaccgccgttctgtgcatgctgtacggcggcatgatgggcaactacgatggtctgtacctgcccatgatgatcctgggctacgtgttcagcgtcccgttcttcatcctgacggtccgtacttctcagaagaagggccagaaggcttccctcatgcgctatgttgccgttgcgctggtcatgtacatcggcgttctggccctgctgctgctgtggaatgaggagaacccggccatgcacctgtccctctactccatggagggcggcttccatctgaccatcaacctgtacacggttctgttcatcctgttcttcggcatcggctacggcgcctactacgccaccgccgatatgcccatccccatggtcgccgactgctccgactatgagacctaccgctccggcaactacgtgcccggcatcatcggcacgctgttcagcctggtggacaagctggtctcctctctgagctccaccgtcgtcggcctggctgctgcggccatcggcttcaccaccgccctgcccggcggcgacgatcccttcgttcccggcatgaactgggtggtcatcatcctgttctgcatcatccccatggttgcctgggctgcgaccctcattgccatgaagggctacgacctgaccggcgaccgcatgaaggagatccaggcggtcaactcctgccgccgcgacgccattgcaaacggcatgtccctggatgacgccatgaacaagtggaccaccatggaccagctgcccgccgagtaccgcgaggctgctgaaaaataatcctccggtttccgcaaactcccaagagacaacggaacccttccggcagtaagccggggccggggcgcaaagtactgctttgcgccccggcttttttgttgcacaaagaaagacaaaacaggatgccctcccgcaaaaagaccggacgcccggatgcgggagagctttccataaaattgtcacaaatttgcgcgcgcaaggtcttgacaaagcggagagaatgcggtattatatcgttcgcttccgaacaaatatttttgctttctgcgtgaaagggtgtgagcgctcccgtggaaaaagactgtggcgcctgggtcaatctgctgtcccataaaatcaggaaacgcctggacgcggcgtttcaggatatggggatcaccggggtacaaagccgggtgatctattatatattggtacacagcaaggaaggcccggtgttccagcgggacattgaaacggtgttcggtttcagccgttccaccgtcacgggattgctgcagaccatggagaaaagcggcattatcgtgcgggaaagcgtcgaaagtgacgcccgtctcaagcggatcgttcccacacagaaagccgtctgtctggacgcccaggtggcggcctgcctgcgggagaccgaccgtatgctgacccggggcctgtccagcgggcagacgcagctctttatggagatcgcggcccagatgtctgcaaatctggacgactggggcgcggccgggcggtcggcccaggactgagcgcggcaggaaaaaatgttcgcggcggaacaaatacggcggcaaaagaccggcggtacggtctgatccggccgtgtaaaagaggaaaaaggaggaatgtcacagatgataaaaacgttggcccgcagtattcgcgagtacaaaacggcagccatcctgacgcctctgctggtaacggtggaggtcattctggaatgtgcgatccccttcgtgatcgccaatctggtcaaccagatgcaggccggctgctccatggccaccatcggccagtacggcgcagccctgatcgtcatggccattgtgtcgctgatcttcggcggcgcggcaggcgctacctgcgcccgggcttcggccggttttgcgcgcaacctgcgcaaggatatgttctataagatccaggattattccttcgagaacatcgacaggttctcggtctccagcctggtcacccgtctgaccaccgacatcaccaacgtccagatggcgttcatgatgatcatccgcgtggccatccgctgcccgctgatgctgatcttctccttcattatgggctttgtgatgggcggacgtctggccatgatcttcctggtcaccatccccctgctgggcgtgggcctgtttttggtcatccgcgccgctaccccgctgttccgcagcgttttccgcaagtacgacgccctgaacgactcggtgcaggaaaacgtccaggccatgcgcgtggtcaagtcctacgtgcgtgaggaatacgaaaagaaaaagttcggcgccgctgccgaggatgtccagaaagacttcaccaaggcggagcgcattatggctatgaacagccccatgatgcagttctgcgtctacgcgggcatggtctttgttctgtcctacggctcctacgccgtcatcaccagcaagggcctggacctgaacgtgggccagatgtcctccatgctgacttacagcttccagatcctcatgagcctgatgatgctctccatggtctttgtcatgatcaccatggctcaggaatccgccgagcgtatcgtggaagtcctgaccgaggaaagcaccctcaccagccccgccgacgccatcaccgacgtcaaggacggctccatcgactttgagaacgtcagcttcaaatactccaagaaggcggagcgccgtgccctggccgacatcaacctgcatatcaagtcgggcgaagtcatcggcatcctgggcgacaccggctcttccaagacctctctgatccagctgatcccccgcctgtacgacgtgaccgagggctgcgtcaaggtgggcggcatcgacgtgcgcaagtacgacctggagaccctgcgcaaccaggtggccgtggtcctgcagaagaacgtcctgttctccggcaccatcaaggacaacctgcgctggggcaaccccaacgccaccgacgccgagatggaggaagcctgccgcctgtcccaggccgatgaattcatccagctgttccccgacaagtacgacacctggatcgagcagggcggcagcaacgtgtccggcggccagaaacagcgcctgtgcattgcccgcgccctgctgaagaagcccaagatcctgatcctggacgactccaccagcgccgtggatacccgcaccgacgcactgatccgcaagggcttccgtgaattcattcccgagaccaccaagatcatcattgcccagcgtgttgccagcgtgcaggacgccgaccgcatcattgtcatggcgggcggccgcattgccgacatcggcacccacgacgagctgatgaagaccagcaaggtctaccgcgagacatacgagacccagaacagagcgggaggtgacaaggatgccgaataacaccaccggccgcggcaagcgcgcccccaagggcgtcatgggccgcctgatccgtacgctgttttccttctatccggtattgatgccggtcactttggtctgcatcctgatcaacgccatcgtcagctcgatgccgtccatcttcatgcagaacgtcatcgccgtggtggaagatacctaccaggccggcgactgggccgcggcttccggccgtatcctcagcctgctgaccatcctggtcaccatgtacgtcatcagcctgatcgcaggcgttttctacacccagttcatggcggtcatcacccagggcaccctggccaaactgcgtgaaaagatgttcgatcacatgcaggacctgcccatccgctacttcgatacccacaaccacggcgatatcatgagtttctacaccaatgatatcgacaccctgcgtcagctcatcagccagagcctgccccagctgaccatctccgccgtcaccctcatcagcgtgttctgcatcatgatgtattacagcatctggctggcgctggtggtcacctgcggcgtgctcatcatgttcttcaccgcccgctacgtcagcggacattcctcccggtacttcctgcagcagcaggtcaccatcgccaagaccgaaggcttcatggaggaaatgatgaacggccagaaggtcgtcaaggtcttctgccacgaggaaggtgccaagcacgacttcgacaaggtcaacgacgagctgtttgaaaacagcgagaaggccaaccgctacgccaacatcctcatgcccctgctggccaacatcggcaacgtcatgtacgtcatcgtggccctggtgggcggcaccctgctgctgtacaacgctcccaacgtgagcatctcgggcatggccctgagcatcagcatcgtggtccccttcctgaacatgaccaagcagtttgccggcgccatcggccaggtctccaaccaggtcaacatggtggtcatgggcctggcaggcgcccaccgtatcttcgagctgctggacgaggaagtggagaccgacgacggctacgtcactctggtcaacgcccgtgaaaaagaggacggcacgctggaggaataccccgagcgcaccaacgtctgggcgtggaagcatccccaccacgacggcaccgtcacctacacccgcctgcagggcgacgtccgcttctacgatgtggactttgcctatgtgccgggcaagacggttctgcacaacgtctcgctgtacgccaagccgggccagaaagtggcctttgtcggctccaccggtgcaggcaagacgaccatcaccaacctgatcaaccgtttctacgatattgccgacggcaagatccgctacgacggcatcaacatcaacaagatcaagaaggccgacctgcgccactctctgggcatcgtcctgcaggacaccaacctgttcaccggcaccgttatggagaacatccgctacggcaacctgaatgcccatgacgaggagtgcatcgccgcggcccagctggccggcgccgacgacttcatccgccgtctgccggaaggctacaacaccatgctcaccggcaacggcgccaacctgagccagggccagcgccagctgctggccatcgcccgtgcggcggtggcggacccgcccgtcatgatcctggatgaggcgacctcctccatcgacacccacaccgaggccattgtccagcggggtatggacgccctgatgaacgggcgcaccacctttgtcatcgcccaccgtctgtccaccgtccagaacgccgacgccatcatggtcctggatcacggccgcatcatcgagcgcggcacccacgaggacctgatcaagctgaaaggcacctactaccagctgtacaccggcgcgctggaactggattgatcgcttcccgcaagatttataccgacacagcaaaagggctgtcaccccaacgggtgacagccctttttgccgtacgccggttttttcccggcaggctgcaaaaaaggaccggaccgcagagcagattgcctgacgggccggtccgttttttgtgtttggtatgcgccctcatgcgctgcgcatgggcagcaggatgcgcagatggaagcagccgtcctccaccttgacggtgaggaagccgctgtatttttccaccgcatggcggatgctcttcaggccgaagccgtggcagccgtcggcggaagccttggtggaaaggggcagcccgtccgccccgaagcggatgtcccgggccaccggattgctgacctggatggccagcagcttgttctcggcatagaccagaacgtcgatgatgcgcttgtccgggtcctgaatggtctggacgtgctcgatggcgttgtccagggcgttggcaaacagggtgtacaggtccaccgggtccatgaaatccagcaggctgccgtcggcgatgcagtgggcctggatgtggttggcctcgcagtacaggctcttttcggtcaggacggtgtccaggacctcgttgcccgtcttggcaatggcgtcgtaaatgcgcacggatttttccagctctttcaggtagacgaccttctcgtcccccaccatggcccgcatggcgcggatctggtgcttgagctcgtggcatttgcggttgatgagcatgatgtttttgcgggccagggcatactgggccttttgctgcatccaaagctggttgagggtatccagctcctgccggatgtagctctttttgaacagctcgtgctggagatacagcagggtgccgcagtaaaactcaatgagcaggggaaacagccacagggcgggcaggtcctccccgtaccacagggtggaggacagctgcaccagcagcaaaatgagcagaagcaggataagggacaggctgagctgccgtggccccacttgataggtccccttgaccggcatccaccgggccagggtcagggcggaggccgccatcagcaccgccacggccagagcggcgcacagattccccgcagggggacaccattccagcgcccggaccagggacagccccaatgagcagctgagatggtacagcaccatggtccacacggcgcagtagaccaccgcgctgcgggaaatatcggcgcacagggcaaaaaagccgttggccagcaaaaagctgacgagaaaatacagccacagcccgctgcccgaggtgatgggcagcagccccaccgccagatgcagcaaaaacccgcctgcaaggcccaggatcaggcgcaggcggaagttttcccggcggcgcagcggccacagaaagatgagggcggcgcaccacagtccggcttcccgccagatctgccatgcccagggaaacagctggttcatcggtcaccgcccacgtagttggtcagcgcggtgaggaaggccgtgtggttgcggcggctgatctccagctcctgccccgccacaatgacggtgtcccggcggacctcggtcacatggcgcaggttgaccagataccagtggttgcagcggacaaaatgataccgctccagctgctgctcggcctgctgcatggtgccgcgcagaacaaattccccttcctcggtatggtagtggagcatccggttctggacctccacataatagatgtcccgggtggagacgcgcttcaccgcgtcgggcaggttgagcagcacctggccgctttcccgtttctgggcgcggtggatggcgcgctcaaaccgcaccgagaaggtgtagtaattgatgggcttgagcacaaagtccagcgcgcccacctcatacccgcggatggcgtactgggccatgttggtcacaaacaccagcaccacatcggcgtcggcagcgcgcagcttctgggcggcctccatgccgttcatgcagggcatctcgatgtccaaaagaatgatgtcaaagcgggaggcgtcccgttccacgatctgaatgccgtcggcaaagctctcgatctcaaacgacagtccgtgttcgtcaccgtaacggcggatgaattcttccagctgttcccggttttcctggtcgtcctctacaatggcaacgtgcaaaagggggcaccctcctttccggcagattgttcagttttcattataccaaattttcacacaagaataaataggcccctcccggccaaaagggaggaaaaatgtgaaaaagccgcgccccggcctgaaaaacagccaaggggcgcggcttttgccggcagaagatggaaagggaatcgggcgggagaggggacatcagtcctcccggcgcagatcgtcggcgggggtggtgcggcctgcccggcgcagggcgggccaggcggcggccaggctcaacagcaccatggcagcactcgccagcaccatggcgccccagggcagggtaaaggagaacacatacaggttggtcagcttgcggtagacaaaccacaagagcaccccgctcaccggcaggccccagcacagggctttcagaccgtagatgccgctttcccagaagatcatgcggcgcaggctctggggcgtcatgcccaccgaccgcagcacggcggattcccggcggcgcatggccatgccgctggacacggtgttggcaatgttggcggcgcacaccagggcgatgagggcggtaaagccgtacagcgccacccgcaccagggccatgatggaggccaggttggccagctcgaaggtcaggtcggtggccgaataataattggtgccgaaggaaagggcgctcagctcatccatgagggcttcccggtcctgtgcctggtaggagaaggtgaagttgcggcggcagtatccgcccacctcggcggtaaagcgttcaaaaaccgcgtcaatggcgctgcgtcccgtgacaaaggtgatggaggtggcggaggggatgatgcgcaccagttcctcgggtacgtcgtccccgtccagcaccgcccggatgttcagggtgacgggcatggtgttgaagtcccagtcgatggtgtccccgggctggaaactggtctgcccccgcacgtcggtgtagccgccctccgacccggtgtagagataccggttgaccagcaggcagtccatcgtctgcccgtcacaggtggcatccgccccggtcagggcggcgtactcctcgtcggagaggacgatgaggtacggcgacatggccagggtgccgtcggcgcccacggtgggggccaggccaaaggcggcgttggcggcatcggtctgggcgctcagttcctgctgctgctcgctgaagcggtcggcaggcaggctggtggaaccccactgcaccgtctcccgcacccggacggcctgggcgttttccggggcgcacagggtggcaaagccggggtcggcggtgatgtcggcggtcaggtcatagctttccagccgggcggtgatgttgtagtcgctgtcccggtggcccatggcgtaggccgtttccagatactgggcaaatccggaagcggtgaccatcaataccacgctcatggtcagggagagcagcgtcgcccggtagcggtggatgctgcgccgggcgtttttccgggccaggacgtactcggggccaaggacccggccaaagagccgcccgccccgcagggcccggcgggagagtctgacctcccccgcgccgcggatggcgtcgatagggccggtcttgcccgcgtggagagcggggacccaggcggagatcagcagcacccccgcggcggtggcggcgctcaaaatcagccacaccggccgcaccgacagggtgagggaaaagtcgtcgatgatcagctccgacacctgccggatgaggggggcagtgagggcaaaggtaagggccagcccggcgcaggcggcggccagacccggagggatgccgatgaccccagcggccagggcttcgtacagaatacaggcggagcgctgttccggagtggccccggcgctggccagcatgcccagggtgcggcggcgctcggccagactgatggaaaaggcgttgtagatcatgagcacagcggccgccgcaatgagcagcagcaaaaacatccgcagcgcgcccacaagggtgagcaggttgtccccgccgccgggggactgcacccccgaccaggccagcagggaggaattgaaccagccgttgaagccggtgcctgcggcggcgatctcttcatccaggtccagaatggcctgcaaagtcccggtgtcggtggacaccgccttgccccagtagtaggtgcggcccgtcccggcagtggcggcggtggcggtggggatcagggaaccggggtcatcctgggaaaagacaaagtggttgtcgatgtgaaagcggtccagcaccgccgtgacggtgtagctgcggctttccccgtcggccccgggcagggtgagggtgtccccgggggcaaggtcatattgccgggcaaaatcggcatagacagcggcctcgccgtcggcggcggggagggtgccttccgacaccaccgcccccagcagctcccaggcgtcgccgcccaccccgatgacctccaccttgccgtagtcggaggagaccgggccggtcaggtcgcaggcatagcccagctccgagaacaggccggaggcgtccagcgtatccagggttccggcgggggaggtactgaccgactccgaggcgatccagtcatagtcgcccacctgggccaccaccgtgcgccgcatggacgccatcactgagtcgatgcccaacagcaccgcggtcaccagcgccgtggacagcaagaccccgatgacggtgaccacgaaccggcttttgtggtggcggatctcggccagggtcagcttttgcaggatgctcacgggcggatcacctcgtctttcacgatgcggccgtcctcaatgcggatcaggcgctgggcctgcagggcaatgtcggggtcgtgggtgatgaggatgagggtctgagcgtattttttgtggaaggttttcagcagctccacaatggcggcgctgtttttggtgtccaggttgccggtgggctcgtcggccagcaccagggcggggcgggtgagtagcgcccgcccgatggatacccgctgctgctgcccgccggacagctggccgggcagggcgttcagccggtcggcgatgcccagctcctcggccagggccttgacctgccctttgcccggcttgcggtggtccagcagcagggggagggtcaggttttcccgcacggtcagcacggggatgaggttgtaaaactgatagaccaggccgatctgacggcggcggaacacggccaggcggctttcgtccagggtggacagctccacgccgtccacctgcaccgagccggaggtgggtttgtccaccccgcccagaatgtgcagcaaagtggacttgccgctgcccgacggccccacgatggagacgaactccccccggttgacggtgagggagacatggtcgagggccaccacctgattgccgctgctgccgtacactttgcacaggtcccggacctgaaggatgggatcgttcatttggcaggatacctccttggaatggctgcccgcccggggccgccgcccccaaaagcccgcgccccgggtgatgggggagcgggcccttgcggcggcctggggcagacagcggttctggcttacaggtccagtgtaacagagggtggtgacgccccggtgaccgtttcggtgacagttttgtcactttccccaaagaggagacggcccggggcgtcggagcggaaaaggatggcaggggtcataccacggcatttggcagggtcagggtaaagcgggcgccggggccgtggttttcggcggtgatgcgtccgccctgcccggtcaccaccgcctgggccagggccaggccgatgcccacgctgtcgggaccggcggagcgtccccggtagaaccgctcaaagagatggggcaggtcggcggggtcgatgccgcctccggtgtcctccaccgtgatgcggcagttgagggcgtccgccccggcggtcacggtcagcacgccgccgtccggcatctgctccacgcagtttttcaggatgttctggagggcctgggccgtccaggcctcgtcacccatccagcgggcgtcggcggggcaggtgacgcggcagtccactccgtgcagctccatggggatgcgcaggggctccagcgccttgtcgatcaggccggacaattccaccggggccttttgcagcgtcaccgccccggcgtccagccgggaaattttgagcagcgtccccaccagccaccggatgcgttccagctggccggtgagccggtcgagaaactccgcccggcggtcggcgggcaggacggggtcggacagcaggtcagtcatcacaagggcgctggtcaggggcgtcttgagctggtgggagatgtcccccagggcgtcggccagatagcttttgtcctttgccaactgatccgcctgctcctgcaaggtcacggtgatcttgtacaggtcatttttgagaaggctcagctccccctcggtgttgtcccggatgtccagcgcccggccgccgccgtacaccccggacaggtaggcgctcaggtcggccagctgccggtagcgccaggcggtgaacaccccgtacccggtgcagagcaccgcccagagcaccagaatcagtaccccggcggcgggggagaggacaaagccaagcaccgtccccacagcccccacccccaggcagaaggcggcaaataacaggatttcccggttgcgcagcatggttcacacctccagacgatagcccagcccccgcaccgtggtgatgaggggcgggcagccgggggattccagcttgtcccgcagccgcttgatgtagacggtcagggtgttgtcgttgacaaaactgcccccctcgtcccagatgcccgccagcagctggcggcgggtcagggtctggccggggttggacacaaaggtcagcagcaggcggtattccagggcggacagagccaccggctccccgtcccgggtgacctcggcctttttcaggtcgatgcggatgcccccgggcagggtggacaccgccgtgccgcccttgcggcgcagcaccgcccggatgcggctttgcagttcccggatgcggaagggcttaaacacatagtcgtcggcgcccatgtccagccccatgacggtgctcagctcgtcgtcgtgggcggtgaggaagatgaccgccgcgtccccggtgcgccgggcggcccggcagacgtcaaagccgctgccgtcgggcaggcccaggtcgatgagcagcagggtgaaccggtgctgcttcagcgcctccagggcggcggccacggtgggggccagggtcagggcatagccctcctgttccagggcgtagcgcaggccgctggcaatggtctcgtcgtcctcgaccagcaggatatgggtcatggtgtgcctcctttacttgcacgggggagagtaatgcttcttttttcagcatacacaaattcgggccgattgcaagtgcttcggcgggatgatggcgctgtatcgcatgatttttgcgaaaactctgtgtaaaatcctgccgtacagccgggaactgcttgcaatttgtgtgaatatgttttatcatatttagaaaagtaacagcccgcgcggcgggcagaaagcagggtttaccgaatgaggatcgcgctgatcgcacatgattcccgcaaggagctgatggcgcagttttgtactgcctacatccgcatcctttcgcagaatgagctggtcgcaaccggcgtcacgggcaagatcgtccacgacgcctgcgggctggaggtgcgctgcctgtatcccggcggccggggcggtgccgagcagatcgcgtccatgatcgcctgcggcgaggtggatatgctgctgttcttccgcgatccggtcagtgccaagcccggggaacccaacgacgtttccctcctgcgcctgtgcgatatgcataccatcccggtggccaccaacattgccacggcggaggtgctcatccacggtctggagcgcggcgacctggcctggatggaactccagcgcggccgcaagtgctgaaaaagccataagccataaaaaagaacccccgtttttgccggtcaggcaaaagcgggggttttgctttgtgttacgcggatcagtaggggtagacgatggcatggcgcacccggtcggaggcctccttgccgaccagctgttccgccagcttgaggccgaaggggatggcagcgcccagagcgcggccggtggtgatgttgccgtccacggtgacttcgtccccggtgtggatggctccggccagaccatcgtccatgccggggtatacggtggccttgcggccttccagcaggccaaagcccgccagcacggtgggggcggcgcagatggctgccacacgcttgcccgcggcgttgcaggcgtcgcagacgcggcggacgtcggggtccgcggccaggttgttcacgccggggatgccgcccggcaggatgcaggcgtcatagtcggcgggatcgatgtcggcggccagggcgtcggtgacgacggtcaccttgtgggacgtcaccaccgtcttgtcgctgcctgccgcggcgatggtcacttccacgccggcgcggcgcaggatatccaccaccagcaaagcctcacactcttccgagccggctgccagaaacacaactgctttggacatatcaaaaacctccttgtcattgggacgatctacgggtcgcgggcggctgctgccgcagttttattgtagcgcatcctgggcggtttggcaatgcggcttgcgcgccgtggccggggatgctacaatttaaggcattgaagcgcgcaaaacggggcagcggcgtctttccgcacagggcggggacaccccgggcgcgcaggaggggaatatcatgcagaacttccgggaatttctgcgccgcaaggacgtgatcttgtcggcgcaccgctacggcatcgacgccatgggagccatggcccagggactgtttgccagcctgctcatcggcaccatcatcaagacgctgggccagcagaccggggtggagtttctggtcacggcaggggagtacgccgccgcggtggcggggcctgccatggcggcgtccatcggctgggcgctgcactgcccgccgctggtgttgttcagcctgatcgccgtgggaggggcggccaacgccctgggcggcgcgggcggaccgctggccgtctattttgtggccatcgtggcggcggaatgcggcaagctggtcagcaaggagaccaaggtggatattcttatcacccccgccgtgacggtgctggtgggtgtggggctgtcggtactgtgcgccccggccatcggcggggcagccagcgcagtgggcagcctgatcatgtgggccaccgaactgcagcccctgctcatgggcgtgctggtgtcggtgctggtgggcatggccctgaccctgcccatctcctcggcggccatctgcgcggccctgggcctgacgggtctggccggcggcgcggcagttgcggggtgctgcgcccagatgatcggctttgcggtcatgagctacaaggaaaacggcgtgggcggcctggtcagccaggggctggggaccagtatgctgcaaatgcccaatatcctgaaaaatccccgggtgtggatcccgcccacgctggcatcggcggtgacgggaccgattgccacctgcctgttccggctggaaatgaacggcccggcggtgtcctccggcatggggacttgcggcctggtggggcagatcggcgtctacaccggctgggcggatgccgtggccgcggggacccgggcagccatcacgccctgggactgggcggggctggtgcttatctgttttgtgctgcccaccctgctcaccctggcctttgccgcgcccctgcgccgctggggctggatcggggaaggcgacctgaaactgaactgactgatacaaaaaccgcccgcagccgggcttttgccgtgctgcgggcggttttttattgtgttatggagcgccggggccggttgaccggtcagggacggcgcaggaaccagatgacacccgctgccgtgagcagcaggatgatcgcgccggctgccaccggcaccacggggaagccggacccgccgtcggtctcgggggcgggggtgggagagacggttgcctccggggtggcggtaggctcgggcgtgggttccggggtaggcgtaggtgttgcagtgggtttgggcgtcggggtggcggtgggggccggagtggccttgccgccgctgccggagctgccggaaccggagccgccgcccgtctgggctgcggggtccaccgcccacttggcgtagagggtggtctcatccaccaggacgatcttggtcaccggctgggtcagggcctggtccttgtaccagccctggaacaggtagccggcgcgcaccggggtgtagggccacagttccacgggagcaccctggccgaaggtcacatcccccaggggcaggccgcccatggtattgaaatgcagggtgatctgcggcggttcgggggaggaggccggagtgggagcctgtaccacggtaaagctgacggtcgccgtggctttgacattgttgttgcccgtgacggtgatggtctcgctgtaagtacccacgttcaggcccgccttgggctgggcggtaaaggtcacggtcttgccgggttccacggtgtcggcggacagtttgcccaccacaaaattgttggcggaggacaccgtcaggccggtcagggtctggttgccggtgttggtcagggtaaaggtctgggcgccgggctgggtgtagccggggtagacgttgccgaaattgatggccgacacattgcaggacagcacgtaggtcttggccgtgacgttcactttgcaggtggcagtcacgccgctgccgtcggtggaggcggcagtgatggtggctgtgccgggggccacggcggtgaccttgccggtctggtccacggtggcgatcttgtcgtcgctgctggtccaggtgagggccttgttggcggcatcatccggtttgacggtggcggtcagggtatcagtgttgcccacaaacagaggaaggtcggtcttgtccagggtcacttcggaaaccgcacgttcctcctggctgtggaaccagagggaatgggttttgttggtgagatcggttttttccgcaaagggggaaccttccacgggctgggcgttggcttcgctgccgccgatggacaccaggatgtgcatcccggctttgggggcgatgatcagggtgctggggtcgccgccgacggaaccgccgatggttgtgccgccggagtcgttggtgatggtgacggagccgcctgcaatggtgatgttgctgccattactgctcatgccgccgccgatgccggaggcatacatgtaaccttggaccatgatattgccgccgttgatggtcacgttgccgccattggtcggtgtgttgacatttgtgttgtaaccgctgccgatgcctgcggcgccttcaccggccttggccgtgatgttgccgccgttgatgatgatattgccgcagctggtgtcggctccgctgccgataccagcagctttgtcctcgccggtggctttcaggctgcccgctttctcgcccgtggactgggcgtaaatggtcagggcgttgccctcggccacgtcaatgccgccgttgacggtcaggctggcctcgtccgccaggatcaggcgcacatcgccggtcacggtgacgcgccgggggatctccacggtgccggtcaccacataccagccgggcgcccccgcggaggcggtccaggcggtatcgccggcagtcaccaccgtggcgttctggcaggtctgtttgccgcccgtttcgtccaggtagtcggccggcatctgctgtgtgacggtcactttgcaggaagccgttctgcccgcgtcgttggtggtgacggtgatggtggcagtgccgggggccacggcggtgacggtgccgttttccaccttggcaatgctctcgttgtcgctcttccaggtcacggactgctcgcccgcatccgtcggtgcgacgatggctttcagggtggcggtgggggccggggactcggcggtgatcgtaagagccagggtagcctggtccagagtcacgccggtgggagcggggccgttgcgtgcgacttcctcgctgtggaaccaggccaggccgctgaccttgtcaatgatgttttcctccgctgtaaaggcggagccggggaccgggctggcgcggtcctggttggcgccggcggtgacggtgagcatctttccctccgctgccgggccgatggtcagggtgccgccgctgccgctgccgctgatgttgttgccgtagccgccgccgatgccggcgccgctgccgctgctggccttgacattgccgccggtaatggtaacagtgccgccgttgcctccgtaggtgccacttccgccgccaatgcccgcgccgctggtgctgctggcaatgacagtgccgccggtaatggtggcagtgccgccgatgccgccgatgttgccgcttccgccgccgatgccggcaccgttgccgccggtggcagtgacagtgccgccgctgatggtaacagtgccgccgctgccgccggtgctgccgccgcttccgccgccgatgccggcgccgctgccgctgctggccttgacaatgccgccggtgatggtgacattgccgccgctgcctccgtaggtgccgcctccgccgccgatgccggcgccgctgccgctgctggccttgacaatgccgccggtaatggtgacagtgccgccgctgccgccgccgctgccgccggcgttgccgtagctgccgccgatgccggcgttgtagctggtggcggtggcggtcaggctgcccatcgtactttcatccgtggactgggcatagatggtcagggcgttgccgccggccacgccaatgccgccgttggcggtcaggctggccccgtccgccaaaatcaggtgcacatcgccggtcacggtgacgcgctggagaatttccacgtcgccggtcaccacataccagccgggggcctcagtggtgccggtccaggtggtaacatcggcagccaccaccgtggcagtggggcaggtctgtttctgtccgtctttatccagatagggcacatccgatgcgggggccgccagtacgcctggggcgcacagcaggcagaacaccagcagggggatcagggcaaacagtcgcttcataggggacacctccttgatggggggacaaaaaattgcaaaaaatgggtgtttattacagtataccatagagatccccccggcgggaagccatccgcaaatttttacgtctgtatagcgacaaaaaagcctgcccgatctgcacaatacgattggacaggcttcttttttagaatgtttcagcggtttactccgcctttttggcaggggctttgccgtcggcggcgggcaggctgaaggtgaagcggcaccatttgccttcctcgctctccacccggatcttgccgccggacaggttgatgagcaccttgcagatgtgcaggcccagccccgaaccgcgggtgttcagcccgcgggagcggtcctctttataaaagcggtcgaacacatagggcagcgcgtcggcggaaatgcccgcgccggtgttttcgatggcaagttccaccatgccgttggcgctggacacatcaaagcggatgacgccccccgccggggtgaacttgatggcgttgtccacaagattgtacaccacctgatgcaccaggtcggggtcggcgtagaccatggtgcgggcgggggcaaggccctggatgtcgatcttggcgtcctcgatgcgctgctcgtcggacagaaccacgtcggtgaccgtctcccacaggtcatagctgcgggcgtggacctggtattctccggcttccagccgggtgatgtccagcatgttctgcacaaggcgcgccagacgccccgtctcctgggatacgatctccagatatttggggcgctcctcctcggggatggtgccgtccagcatgccgtcgataaagcccttgatggtggtcatgggggtgcgcagctcgtgggcgatgttgcccatgaactgaccccgggaattgtcaatggtctgcagccgggatgccatgttgttgaaagttaccgcaaaatccgccagctcgctgcatccggtcacgggggcgcgggcggtaaagtcgccgctgcccagcttgcgggcggcctcgctgatggcctcgatggggccggtgaaccgccgggcaaacacgatggacagcacgctggccaccagcagcgccagcgccgccgacaacaggaacatgttgatcatgtcgccaacatagttgcccagggcgccgatgtcggtggcggcaaacatgtatcccgccgacccgttggtgctgatggcccggcccagcacatagaatttgtggctgaacaccccgcccaggtccccggtgagaaatacctcgccgtcggtcaggatcttgttcagcatgtcggcggggaccggcgcgccggtcagcacgtcgccgccggtgtggatcaggatgttgccttcatcgtcggtgacaaacagcagggtcttggccgcggtgttgaacagctccagcccctgctcggcccggtcgcgcagggcctcgtccacaatgggctcggtaatggtgctgccatccgcggccaggacctcgctcatggcagcggcgccgtccagaatgcccgtcagcgcgctgcggcgctcggtggaaaagtacgccgccgaaagcgccgtctggcacaggcagaccacgcccagccccagcagcagcacggcggccacgctggagaaaaactcccggctgatggtccttgtgcgcatggttattctttcacctcgaatttgtagcccacgccccacaccgtcttgagctgccactggtcagaggcattctccagcttttcacgcaggcgcttgacatgtacgtcgatggtgcggctgtcgccgtaatattcaaagccccagacctcgtccagcagctggtcgcgggtgtacacccggttgggatggcttgccaggcaggccagcagttccagctccttgggcggagcctccaccaccttgcccttgaccttcagctcgtagcggttcatgtccaggtgcaggttgtcaaagtcgtaaacgcccttgttctcctcgtcgtcggtgacggcgcagcggcgcagcaccgccttgatgcgggcggtgacttccttggcgtcaaagggcttgacgatgtagtcgtcggcgcccagttccaggcccaggaccttgtcgtaggtctcgcccttggcagtgagcatgatgatgggggtcttgttgttggcgcggatcttgcggcagacctcccagccgtccatgaccggcatcatcacgtccaaaagcaccatgtcaggcttgagtttttcaaattcggccagggcggcgctgccgtcgtaggccagggtcaccgcgtagccctccttgaccaggtaaagccgcagaagttcgcaaatatttttgtcgtcatcgactacgaggatcttctcgttcgccatgttgtctcctcctctatccggtggactgttccacagattatacctattatacggggtaaatgtggaaaaataaagaataaaccgttgcttttttcttgcgcgcggggcgggggtcgggtataatgataaacggcggcgtatgccgcttgaacaataccagtatttccgcaccgcgtccgccacgggcgcggcggcggtgagaccctaggatacaaaaggagaatgtcagcatgaaattaggtatcctcggcctgcccaacgtgggcaagtccaccctgttcaatgcgatcaccagcaccaagaatgcccaggcggccaactatcccttctgcaccattgagcccaactccggcatcgtggcggtgccggacccccggctggacaagctggccgaggtctggcagaccgacaaaaagacccctgccatcgtggagttcgtggacattgcgggcctggtcaagggcgcggcccagggcgcgggcctgggcaacaagtttctgggccatatccgggaatgcgacgcccttgtccacgtggtgcgctgctttgacgacgacaacatcatccacgtggtggaggacgtgaacaagcccgagagcgtggaccccatccgggacatcgacgccatcgacctggagctgatcctctccgacctggaggtcgtttccaaccgtcagggccgtcaggccaaggccgccaagaccggcaacaaggccgcggccgccgaggctgcctggctggccgagctggctgcccatctggaagccggcaagcccgcccgcacctttgagcgcaccgagggcgacgacgcccaggcccgcacctggaaggagatgggcctgctctccgccaagccggtgatctacgcctgcaacgtgggcgaggacgacctgctgggcggcatcgacgaaaacccctactatcctctggtggcggcccgcgccaaggaggagggcgcccaggccctgcccatctgcgccaagaccgaggaggacatcgccgactccacccccgaggaaaagctggctttcctgcatgagatgggcatcgagtccacaggtctcgacaacctcatcaaggcaagctacgagctgttgggccttatcagtttcctgaccgacggcaaaaaggaatgccgtgcctggaccatcaagcggggaaccaaggcgccccaggccgcgggcaagatccactccgactttgagcggggcttcatccgcgcccaggtcatcgcctacgacaccctggccgagtgcaactttgactacgcggcggtgaaggccaagggcctgcagcgcaccgagggcaaggagtacgtggtcaacgacggcgacatcatcgaatttctgttcaacgtctgatggaggaacaccaatgacatacggcattatgggcgccatgcccgacgaagtggaccagctgtgcgcacgcctgaccggcgtgaccaaggagacctacgccggggtggaataccaccagggcaagctgggggacaaggaagtggtggtctgctgcgccggcatgggcaaggccaacgccgcctccacggtgcaggtgctcatcacccggtacggggtggagcagctgatcttctccggcattgcgggcaacatgaccagccgcatcggaatcggggacgtggtcgtggggcagactgtactgtatcacgacgccgagctggacatgctggcccagagcgcgccttttctgaaggaatacaccggcgaccccaccctggtcaaagcagcgctggacgcctgcgccgcctgcggggtcaaggccattgccgggcgcattgccaccggcgaccgttttgtgggcgacgccgagaccaagaaagccattgaggaagcctgccatcccgactgtgtggagatggagggcgcggcggtgagccaggtggcgggacgcaacggggtaccctgcgtcattctgcgggccatgagcgacaacgccgacgaatccggctacgatgtgctggtggtgaagaagttcagcatcaccgagtacgtcaagactgccaccgacatcgtgacccggatgctggagaccctgtaaccttcctgccatccgcccgggcgcttttgcccgagcccatccaagaagggagagaacacgccattgcagctggcctttattaccgccagacaggtgttgatattgtttctgatgatcgtggccgggtttgtctgcggcaagaccggtgcgatcaagccggacgggaaaaagaccctgtccgaccttttgctgtacctggtcatgcccgccatgatcctggactcctacctgatcgagtttgacgccgagaccttcggcaatctgctggtcgctttcggcctgagcgcggcccttatgctgggcggcctggccattgcggtgctgctgaccctgcgcagcaaaagcgccgaccggaccatggtccggtttgcctgcatgttttccaacgccggatacatgggcatccccctggtgcgggccgtctacggcgagaccgccgtgctgtacgccagcgcctttctgacagtgttcaacattctggtctggaccatcggctacgtcatggtcagcggccaggcccagcccaaagctgtcctgcgcagcatcctcacctgccccagcatcatcgcggtggcggtggggttggtggtctacctgggacgcatccccgtgccggacatcctgaccgagacggtggatctggtgggcggcatgaacacgcccctttccatgatcatcaccggtctgaccatggccggccacgacctgcgcgccctgctgaaaaagcgggagctgcccgtggtcatggtgctgcgcctggtggtcatccccctcatcagcctggccgtgctgcggctgctgggggtgcgaggactggtggcggacgtctgcctgctgctggaagcctgccccaccgccgccgtcaccacggtgtttgcggtgcgctttgccaaaagcgaggacctggccgccggtgcggtggtctttaccaccctggccagcatgatctggctgcccgtctacgccctgctgatctcggcggtgtgacggcggcaaaagttttccacaccaatgtgcaaaacgaccccgcccccggaaggtgtttgaaaccttccgggggcggggttttatttggtgtcagcggcgggcgcctgcgccattacagaaagccgcgccaggtctgttcggcctgctcctggaactggcacagttcctgcatgagtttgtgagcccccggggatgcctggggataatcggtctccgcccgcttgcagtccatgacgccttggccgctgccctcggccagcatggtggccaggttgcgggtggacttgtccatcatggtgcgggtgcggatgcccatgctcacccccatgcgggccgcggcgctctggcctttggcctccgccccgatggcgtccagggcggtgtgggccgcctggttgatgcggcggtactcccgcttctggcgcagcatctcggttttcagctgctggtcccgggtcagggtcatcagctcatccagggtgatcttgcccatctcggtgttctggacgatctcctggagcatggattcgttgtcgctgctgtgttcgttcgccataaaaataaccccctgtgtacgcagaaatcatcttccggtcccgcgggaccgtcggtgatagtatgcgcaccagggggatgggttataccggaaaagaaaggtcaggcggtgaccaggcgctgctccgccagggacaacagcagatcccagttgccggtctcggcccagtcggcggatgccaccgccaccgagaactcgccccggcgggacagggaaatgttgaagatccggcggctgccgtccatggcttcccgcacgtcggaggccagcttggcaccggggcattctccggccagcagaaagacgccgtcctccagacggaccagaagcacctgctccgggtcggcgccggcggcccgctgcaaaatgcccgccgccgtgttcaggcagcagtcggcggcgtcgcggccgtactcccggcagatctgggcgtattccttgacgcggatcagggcaatgccgatgccggcgccctcgtgccggggcagccaggactccaccagatagcggcggttgtaggcgccggtcacgtagtcgcggctcagttcctcatggtactgggccagcagacggcgcagggcgttggcctcgcggccctcggtgggctgcgggtcgggcaggtggcagtccatcaccaccaggcagggctggccgtccacctgtaccgcccggtacagggtcatggcgtcctccccgccggaagcgggcagccatccccggccggaagcatccagcgccgggatctggcaggcaccgccggccggcgccatggtggcggggtccagcaggcagccggtggccgggtccgccagacggacggccgggaacatctgctgcaatgcgtccagcagggacacgatctcgctgcgggtatattcctgtttcatgcgattccccttcccatgtgcggcacagcggcaaaaagcccctctgccctgtccgcacttccttgacagggcggccccggacgcctgtgcataaaaaacaaagcccctgcaaactccctctgcatggcaggaccccggcagaccagccgccggccgggattccgccgccttgctttttatacgggcgaacaaaaagccccctatgtataaaatatcggttctctcccatattttatcatagagggcaaagttttcctacctttgcgttgcacaaagaaattacagaaaccgcgggggatattgggcatcccgactatgaaaattctgccgcagcgtcattttttgacactgtgtgcggaatttttttcgccctttcgcgcagttgcctcctccgccgcggcggggacggactgcgtttttttcgcatccttttcctcgggggcagcgtctttggcgggggcggtatccttggcgggcttcaggggttcggcgcggaagaaccgcaccgacatggcccggatctcggcggcaagggcggtggtaaagacgccctgggccgcacgccactgccagttgccgtcggcgcggccgggggtgttgatgcgggcctcggtgcccaggcccagccagtcggtcatggggacgacggccagccgtgccgggcttgccatcacgccgcgcagaatacccaggcgcacgccctcgctctcggtcagggccaggtagccggtcagctggtcccgctgcttgtcggtcaggccggtgtcccaccagcccagcaaagtgtcgttgtcgtgggtgccggggtagcagacgcagttggccgggtagttgtggggcaggtactcgttgtcgctgccgtccagggcaaactgcaataccttcatgccggggaaaccgctctcggccagcagctgccgcactgaggggaacagctcgcccaggtcctccgccacgatgggcagctcgcccaaagcggcccgcagcatgcggaacaaatccatgccgggaccctgctcccatttgccgttgcgggcggttttctccccggcgggaatggcccagtaggtgtcgaagccgcggaaatggtcgatgcgcagaatatcgtagatggacaaagcatggcgcacccggcggatccaccaggcgtagttggtctttttgtggtaggcccagtcgtacaggggattgccccacagctggccgtcggcggcaaagtagtcgggcgggcagccggccacccgcaggggatgcccgtcggagtccatctcgaacagtttgccgcctgcccaggcatcggcggaatccgccgccacatagatgggtacgtcgcccatgatgcgcacgccgtgggcgttggcgtaggctttcaatgcctgccactgcttgtcgaactcatactgcacaaaggcccagaatccgatctcggcggcgtgggtgcggcggaactccgccagggcggcttcctcccgcaggcgcaggggacggggccactgctgccagtcggccattttctgctcctgcttgatggccatgtacaggcagtagtcgggcagccagccgtcgcagcggaaggtaaagctgtaccagtcgtcggggtagggggtctcgcacccgggaacgggccgctgcttcaaaaaggcggcgtaggccttgcgcagcacgggcaggcgcttttcatacaaaaggccgtagtccaccttttccgggtcggcgccccagtcggtaaaggcgtagtcagcccgggacaaaagaccctgggccgccagcagatccagatcgatgaggtaagggttgcccgcaaaggcggagcagctctggtaggggctgtcgccgtagccggtggggcctacgggcagaatctgccagacgctctgcccggcccgggccaggaaatccacgaaccgccgggcgggggcgcccagggaaccgatgccatgcccgccgggcaggctggacagcggcatcaggatgccgcttgcgcgttttgtctgaatcaatgggatcgtctcctttaccaaaatgataccgcaaaaaaaccgcatcccagcgggaaatccagaaagaaaggaaaaaatcaggccacgtccagcccggccagcaccgcctccacaaaggcggtcttggtggcggtggagcgggtctcggcggccaccacgtcggcgcaggccttggccaggtcagcgctgcgggtgccgttcagggcgacctcgggcaggatgccggtgctcaccagctgcacctgcaaagcacccagggtggtggagtcggatgccgtgttccagggggtgaccagatacaggtcgtcggtcaggcgggtgttgccgtcgccgctgccgtacagccacaaaatggcggaggcggcggccttctggtcggcgctgccgttatcggggatggccagataccccgcacaggccagggtagggtagttcatcaggccggaaaggttgtattcctcggtggtcaggtcgctgtcctccagctggcacttgacgggcagggggaccagagtctgggcccggtcggagcccaccaccgccaccacgtcggccagcaggccgcggtacaaaagggcggtgccgctgcccagagcccccgcggcgtcctgcatggtgcgggaggcatccccggcggtgttttccgcttccaggacgacggcgctgtacaggccgttgagagggccggtgagggtcttgtcagtatattcgctgcccgcagccagcagaacgttggtgaacagcgccccgcccaggcaggagacctggtcggcgccgcccatggcaaagacgccctccaggccggcggcggcttcgggggcctcggcgggcagggtgtagctgttgccgttgagggtgaccttggtctcggacggggcctcgatccaggcggtcatggtctcggcaaagtcgctccactccgaccaggaggcgttctgcaggtcggtcaggcagtcctcccccagcagggcggtgaggacggtactgtccgcccagtaagcgtacagcgtccggcccaggggcagagcggtgacgctctcctcaccctcgccgggcagacccgcccgggcggccgcggccttgagcagggagtcccccgtcaggtcggtccagccctcggcgtcggcgggctgggcggccagcagcgccaggtcggcggaagccaggccctcctccccggagacgaactccaccgtcacgttctgggcctcggcgtaggcgttcagcgcggcccgtccggcgctgccttcgggcaggtcgcagtagacggtgagggactggggttcggcctcgggggcggcgggcagcgtcgccccctgggcggaggaagagccttgtgcggaacagccggccagacaggcgacggccagcagcgttgcaagtaagcgtttcatgggaagggttctcctttttgtgtgagaaaaaatacggtgatgcggcagaaatttcgccgccgcgccgcagagcgggcgtccgccctccaagggggcgcacccgggcaaaaagcactgattttattataacggatggcggcggttttttccactgccgttttttgtaccgtttttgggtgcgggtttccccggggcggggtttatgttataatgactgcatattgcgtaaaaaaggagctgagcccatggtccccacccgccgcctgtatgaggaaacccccaccctgcgcgcctttgacgccgccgtggtgcagtgccgccccgaccccactgccgaaggctactgggagaccgccctggacgccaccgccttttacccggagggtggcggccagccctgcgacctgggccttttgggggagcagccggtgctggcggtgcgcatcgacggggagggtgtcgtctggcaccggacggcgcagcctttgccggagggcacggccctgcacggggagatcgactgggaccgccgctttgaccatatgcagcagcataccggcgagcatatcctgagcggcattctccacagcctgtacggggcggagaatgtgggctttcacatcggcagcccggcggtgcgggtggacgtcagtctgccattgaccgccgaacagcttgccagagcggaggaacaggccaacgacacggtgcaggcggacaaaccggtgcattgctgggtgccgccccatgaagaactggcaaacctgccctaccgcagcaaaaaggagctggagggcgacgtgcggctggtggatgccggcggcgccgacctgtgcgcctgctgcggcacccacgtggccaccacgggacaggtgggactcatcaagatcctgagcgcccagaactataagggcggggtgcggctggccgtagcctgcggaaaacgggcgtaccgggcggtgagtgacctctgggccgacagccaggccgcgggggcgctgctcagcgttcccgccggggagagcgcccgggcggtgcggcacctgctggacgcccagtctgccgaccgccagcgcctggccgctctgcagaacgccctggccgaccagacggcggccgccgccccggcgggggaaccctatgtgggcttttttgacggccccgaccccgacggcctgcgccgcatctgcctgaccgtggcccaaaagaccggcgcccgctgtgctgtctttgcccccggcgggcagggcctggcctatgctctgtccgacccggaggacgtccgcaccctctgccgcaggctcaacgcccagttcggcggccggggcggcggcaaagcggttttgtgccagggcagcctgcccgccggcaccgaccggaaggcggtggaggaattcctgcgcggggaatgacccccgcacccacagacggaccaacattttccacgatgacaatctgatatgacaggagaaagaccccatgcgaatgcgtttcaaaccctatgccaggccggaattgctggcctgcgacttccacgtccacgagccgctgaaaaacgccggtcactggcatgaactctacccccgtcccgaccagcccctgcatctggagctgggctgcggcaagggcggtttcatggcccagctggccccccgggaccggagcatcaactacctgggcatcgacatcaccgacaaggtgctgattctggccaagcgcaagatcgaggccgcctatgccgagaaaggcatccccgcggacaacgtgcgcattgcctctttggacatcgagcgcatgcgcctggtctttgtgccagaggacaccgtccagcgtatctacatcaatttctgcaatccctggagcaagaacgccggcagcaacaagcaccgcctgacccatccccggcagcttttgcagtaccggatgctcatgccggagggtgccgagatctacttcaagaccgacgacgacgatctcttccgggacagcctggggtatttcccggcggcggggtttgagatcacctggcagacctacgacctgcacaaggatgaaccggactggaacatccgcaccgagcacgagggcatgttcaccgagcagggcattcccatcaaggcgctcattgcccgcaagctgcccgattccgccgtgacctggcaggagcccaaggccctggcccgggccgctggggaggatgaggcagccgatgccgatgccgcacagggtaaggaggccgaagactgattatgaccgctacggtctgggaatacatcctttactttttcatctacgcctttatgggctggatgaccgaggtcgtctttgcggccctgcgctcccacaccctggtcaaccggggctttctcaacggcccggtctgcccggtgtacggctttggcatggtggccatgctggtactgctgggcatccatgccaaaagcccgctggtggtgtttgcggtgggggtcattgtccccaccctggtggagctcatcgccggggcgctgctgtacggcctgttccatgcccggtggtgggactactcggataaaaaattcaacatcggcggttttatctgcctgcaattctccctggcatggggtgcggccagcattttcatgatcatggtgctgcacccgcccattgcccggctggtggcggccatcccggatactgcccagcgtgtggcaggtgtcgttctgctggtgatctttgctgcggatgtgggcgtttccgccgccgaggccatcggtctggaccgccgtctgcgccagatggacgaactgcgcgccgccatgcgcaagggcagcgacctgctcaccgagctggtgggcgggcaggccctgaccgccgacgaactgtgggacgagggcaagctgcagctggccctggcccggatggaaggccgggacaacgccgccgaggccctggcccagttccaggcccgccgcagcgagatcatggcccggtacaaggaactgaccgcccgcttcgaccggcagcggttctttggtgcgggacgtctgctccgggccttccccaccctcaaaagccccgaacacagcgagacgctggaacgtctgcgccgccacctccacggctttggccggggcggctggggacgccattgagccgttcctgtttttccgcaatttgaaaatggtaagataacaaaagacccggcagccgggaaatggctgccgggtcttttttgttgtttcaggccggtaggtcggggaaacctcagtttccgcccatgccccggcggtgcagcgcacgcagcgcccgcaaagcctgcaggcggcggcgggacacgggattctgggcaggttcgggccgggcgggggcggccggttcttcttccggctcgtcctcggggggcaggtcgtcctcctcttcctcgtcgtcggtcaaaaccggcatgacggggcggcgcgggccgcggctgggcggctgttcgtccagcaccggctcctgctcctgccgcagaatgggctgggagaagatggcgcccgggacttcgtgggtgggggcgtcctccggctcctccaccagggtaaagccgggacggctgggttccacctccggctcgggcaggggttcgcccgcaggctcggcgtggagcggctcgggggtgggttccggctcgggcgggacctcggcggcaagctctgccgccgccttggcaatggcccgctcggaaaagtccagctggacctccggcgcctccaccgggctcaggtccagctcctcggcgggggtatcggtctggggcaggccgggggccttgtccactgcctcctgtcccgcctgggtcaggatctcggccatatgtttcaggtaatccaccatctcggtgcggcgctggtccatctgggcgatctccgccttcaggttgttcagccgcagctggtggatgttctggatctcgttggcttcgctggccgccgcgtcgatcagctcctgggcctggacccgggcctggtcccgggcggtgcgggcaatggctgcggcgtcgctctccgctttgcgggcggtcttttccgcttcgtcacgggcctggcgcaccagttcgtcggccttggcctgggcttcggacatcagtttctggcggctggcgtccagggactgcttggcctcgtccagttcccggcctttcactttcagcgcggcctgggcctggtcggcctgctcctgcaggcggcggttttcccgggtcaggtcggcgtttttcagggtaagtacggcgttctggtcggtgagggaacggttcttctcccgcagggtggacacctgaccgctcagctcctggcgctggcgggaatagttgtcgctgctgcctgccagggatacgttctggtcggtgagcatccggttgcgggccgtcagggcctgacagtgcttttccagcccggcgttttcctgggcaagctgctgggcgcgctcctcggcgcgggtcagacgcttttcatattcactgctcagcgcaagcatggcctggcgcacgtcatccggttccagcccgccgaagcgcgccttgcggatgccgcactgttcgataaatgccgcaatgtcgatgtttgccactgtttcgccgtcctgttccggcgcacggagcgcctgttttgtataagtaccttaattataccaagccgggaccggcaaatcaatacgaaaccccgcccctcctgccgcaggccggggaagcgggtcgaagcccggcaaaacaaaaaggccgcggtgcggcagagcaccacggcggcaaaaggcggatgatacattggactgcaaagcgcggcatcggcgggaaaatcctccgggggaggcgttcggctggcggccgtccgccgtgggcgcggcagacccggcttgctttttgggggaaaagccatgcgggatttggaaaaagaggtcgtggggggaaacttgcgataggggggaaatcggagagggatgtacagagatcgggggtcatctatgtcgccatcggaaaacgccccacgggcgggatggtcaaagatcctcatgccgccggacttggccccgggcggttgcccgccgcggcggcggcactgtctgggcgagggagagggtaaaaatcagtggaaaacggatttacaaatcgggtcaggaacggatacggacggcaaaggaaacggaacgtttcagatgcgcagcggcatggtgcgcacctcggcccacgggggcaaaatcaggacacagcgggcgggggcgtcccgggactgggacgccggtgcgccgcccggcggcggagtggcttcggttctggtatcacgcccgggacggggcaggtgcagggtgcggcccccggtccggcaggcaccggcgggcagcaaagtgacgtcggtccagaattcctgcccggagcagggcgcaaggccgctgccgggggcagccagcagcaagagggatgcggccagcgcccggcgggcagcctgctgcatccggcggcgcagcacgtccagggcgcgtcccgccccttgcagcagggcggaggtctgcgcggcagggcgggcggcgcgggtgatatgtacggcagcgcggcgggcatgtcccgccagcaggcagcaggcagcgagagcggcggaaacaaaggcaaacgcaggatgcgtgaaagttctcatggatggattcctcccttggttcatggtgtggaacaaaatgagggtccggcacaagggggccgcaggccggaagccgtccgcaaaaggcggcggtggccgcgcccgggtcggcaggggcgtggggcttgtccggtgcaggccgcaaaaggcggcaaaggcccggcaaaacgctcgggcgtgatgtgggaaaccggaacagcctgtcccccggccggtcagccgggcagatgcagcggaagcggaggagggcgggggcctctcccttgatgctgaaccgattatagccccggcccggcgcaaatgttgcgggaaggtgtcggcggaacacaagaacttctcgccaaaaatcgcgcaggaaaaaatgcggaaaaaagcatgtgaaaaaatgccgcaaaacttgacttttgaacacaatgtctcataatatatgttatgtggtgaaaatgccgcgaacggaacgcctcacggcagacactgcgttgtcacgcatttacataaatcgcagaaacgtgaaaactgggaggaaacaacatgaaaaaacgtctgttgtcctggttgctggcgatcagcatgctgaccgccgccatgcccaccgcctttgcggaaggggttgcagcagccaccgaaccggcaccggtatcgatgtcggatgttacagaggataattccgaacctgccggcgaggtgatcgtcgaggaagaggagaccgagccggagaccccggaggatacttcggaggaaccggctgccgacagcaccgtcgccagcgtccccgccgagacggacccagcggagcagccttctgccgcaaacggcattgcgctgctttccgacgaagagcagggtgatcctgtctgcaccgacggcacgacggaatatgccaccctggcccaggcggtcaatgaggcccccgacggaagcaccatcaccctgacggcggatttcaccatgtccaacgacggcattgccaccgttcccgcgggcaagaccctgaccctggatatggccggccatgccatcaccgttaccgaggattttgtgggccgtcccatcgtcaacaacggcaccctgacggtcaagggcgagggaaccatcgatgcgtctgcctctgtcaacggcggttacggcgccatcaacaactacggcaccctgaccattgagaacggcaacttcaagggcagcgtcatgggcaatgccgcgtgcatctatgtgcgttccggcgcaactgccaccatcaacggcggcaatttctctggttccaccgttgccgtcaagagcgaaggcgacctgaccatccatggcggtaccttctccaccacttcctgcaaccagaccatcaatgaagccggcgagaaatgctacgcctactgcatcatcagctccggcacgctgtacatcagcgacgccgatgttaccggcgtccagggcgccctggccatcaacaacggctatgcagtggtggacggcggcaattaccgcaccgtcggctgcgagcatgacaagggcactgccggcgcctattccttctacgccctgtacatcgctggtgaggagggcaaagtcgaagcccacatcaacggcggtacttataacgcgatctaccgctctgcggttttggccggcaacgacaataccggcggcgacggcggcatcaatgccaaggccaccgcttacatcaccggcggcaccttcaacggcggccctgcgggcaaagctctgagcgccggcaagaacaccggcgacccccagatcaccggcggcaccttcaataccgatgtgtccgactacgtggctcccggcagcatccagaaggatgacagcggcaactttgtcgtccgcgctctgaccgcggaggaccccgagaccctggccgaagtggacggcgtctactacgatgacctgggcgaggccctggccgctgcggcggacagcaagaccgttgtcctgcagaaggacgtcaccctgtctgcctccgtcagcgcagcaggcacttccgtgctggacctgaacggccacaccgtccaggccggtgacgccatgaccggcagcatgatcctggtgggcgagggcgtctccctggagatcaccggcgccagcggcgccatcaagggcaatgcccagaccacggccgcggtggagaccaccggcggcagcgtgaccgtcagcggcggcagtgtggagaacaccctgcccgcccagagcgacaaagccaagggtatcggcatcaagtccagcaagggcaccgtcaccgtgaccggcggcagcgtcctgggcaaccgtggcatccagtccgttgacggcaccgtcaatgtgaccggcggcacggtcaagagcaccgtgaccgacaccaaatattacaactatgccatcctgtccaagggcggcagcgttgccgtgagcggcgatgccgtggtcgacggcggcgagatctccagcgccatccaggcttccggcgccaaggtggatatttccggcaacgccaagctgagcggcgagaccggcatcgacatcttcaactataacggcaccaacaatgcggacgatccttccagcacggtgaccatcaccggcggcagcatcacctgcgaatactttgccgttgacggcaacaacctgcagtcggcaggcaccacggtcgtcatcaccggcggcacgctgtatgccgacaagaccggcccggccatctactggcccatggaaggcagcctgaccatcggcggcaccgccaaggtcagcggcggcaccgccatcgaggccaagatgggcaccatcaccatcaaggaccaggctgtcatcgaaggcaccggcgactacaacgaaaacgagccccagaacggcggttcttctcccgaaggctccgccctgctgttctccgcccagatgtacggcggcgtcaacacccagtaccgcacctctcccgacctgacggtcaacatcgagggcggcacccttaagagcgtcaacggcaatgccgtgaccgtttacaacaccgaaaagaccgacgcccagaccgccaaggtcaccgtcagcggcggcaccatggagtatcccgagggcaaggctgcgatccgctcctacaccagcggcggcaatgacgccggtgtgaccggcgacggcctgaccaccaccaagagcaagaccaccgttgaggtcaagaacaccgcggcggctgctgccaccgacgccaacggcgtgaccctgtactacaccagcgtggatacggctctggccgctgccggcagcaatcctgtggaagtgttcgtctttggcgagagtgatgtctccgttgagatgctggacaaggaaaacgtcaccctgaccgttgccgacggcgtgaacctgtacgtgggcaacggcaccgacgacatggtcctccaggccaccaagaatgccgacggcagcaccagctacaagctggtggacaagaccagcggcgccgtgaccgttgatcctcccatcgttaccctgacggcggacaagacctctgccaccgagggcgagaccatcaccctgaccgccaaggccacccataccaacgacaaggtgaccgagtacagctacgcctggtacaaggacggcgtgctcatccccggccagaccggcagcaccctgaccgttacctccgccggcagctacaccgtcggcgtccgcgccaagctggcggatgagaacgatgccagcatcgtctatctgtccgacgagcgggtctccgccgccatggccctgaccttcaccccgcgcccgggccagaaccagcccgttgacgagcatcccgagatcggtgaggccattgccaacggtacctggggccagccggattccgctgctgcggtttcttccaacaactccgcagctggcagcacctcggtcagcgttccccagaccagcgacgacgccaacctgaccctgtggatcgttctgctggcagtctctgccgttgccattgtggttctgggcgtagtcatctaccgccgccgcaagagcagcaagtgatccccgtaaatccaggataagttaccccaacgcagccggaacggcccgcacagcgcggcgccgtcccggctgctttttgtaaatgtgcgtctctgcgcggttttggccggcgactcccggggcaaaatttcaccggcccgccgcccgcttttcttgcccggaaaggcggtttgtggtatactattacggttaaaatggagaggtgtagacaaatgcgggttttgggcattgaccccgggtatgccatcgtgggctggggggtactggattatacgggcaaccggttcgcgccggtggcctacggggcgattttgaccgacaaggacaccccctttgaacaacgcctggccgagatctacaccggcatgaacgaggtctgtaccaagtaccggccccaggctctttccgttgaaaaactgtactaccagcacaaccagaccaccgtcatcggggtggcggaggcccggggcgtgatcctgctctccgcggcccaggcgggggtgcccatctatgagtacactcccatgcaggtcaagcaggcggtgaccggctacggcaaggcggtgaaaaagcagatccaggaaatgacccggattttgctgcacctggatgccatccccaagcccgacgataccgccgacgccctggccctggccatcgcccactgtcattgcagccgcagccgcatcgccggcacgccgccgcgctgaaccggaggaggaaacagatggactgtcctttttgcaagatccccatgcggcagggctggttccagtgcggcatggccctgtggagcgagaaaaaacacgccctgaccctgaacccggggccggaggaagcctatgccctcagcctgggcaaaaccatgttctctccccatcagctggaaagctggttctgcccccgctgccggaagatcctgctggatgcctccgggtatgagtccaatatccggccggaatgaccccggcctcccttccatagagaaaaggagcacacaccatgatctattgcctgaccggcaaggtcgtcaaaaaaacactggacaccgtggtcatcagctgcgggggcgtgggatacctggcacaggtccccaccaccacggcgggcagcctgcccgcccccggggaggaagccaccctctatacctttatgaatgtcaccgagaacgacgtggccctctacggcttttcgtcggaggaacagcagtcctgcttcaagctgctcacctcggtcaccggcgtgggccccaaggcggccctggcggttctgtccgtcatgagccccgaaaaggtcgccctggcggcgtcctccggggaccacaaggcctttaccaaggcatcgggcgtgggtcccaagctggcccagcgcatcgccctggaactgaaggacaaggtgggcaagggcctggccatgggcaccggctttgccgaacccggggaggcagcccccgccgccggttccgccccgtcccaggcggtggccgccctggtggctctgggctacaatgcctccgacgctgcccgggccgtttcccgtgtggacgacaccctgccggtgcaggacatcatcaagattgctctgcgcgggctttccaagctgtaaccgtcaaggagggataccgtgaatcaggaatataccgttgaccccacccgccttgtcactcccgacgtcaccgaggccgacagcgaggaagtgagcctccgccccaaaacgctggaggactacgtgggacaggaaaaggtcaaatccaacctttccatttatctgcgggcggcccagcgccggggcgagcccatggaccatatcttgttgtacggccctccgggccttggcaagaccaccctggcgggcatcgtggcccaggagatgggggtgcagatccgcatcacctccggccccgccattgaaaagcccggcgacctggccgccctgctcaccaacctgcaggagggggacgtcctttttatcgacgagatccaccgcctttcccggcaggtggaggaagtgctctaccccgctctggaggactacgctctcgacattatgatcggcaaaggccccagtgcccagagcatccgcatcaacctgccccggttcaccctcatcggcgccaccacccgggcgggacagctcaccggccctctgcgggaccgcttcggcatcctgctcaagctggaaccctacagccccgacgagctggcccgcatcatcgagcgcagcgcctccattctgggcatccctaccacccacgagggcgccctggaactggccaggtgcagccggggcaccccccgtatcgccaaccgcctgctcaagcgtgcccgggactttgccaccgtgcggggagacggcaccatcgacgaggaatccgccatcgacgcccgggtccagatggacattgacgagctgggcctggacgagctggaccgcagcctgctgcgtgccattattgaaatgtacggcggcggcccggtgggtctggagaccctggccgcggccctgggtgaggagagcgtcaccctggaggacatctgcgagccctacctgatgcagatgggcttcctcacccggacgccccggggacgctgcgtcacccggctggcctacgaacacctgcacatgccggtcccccgccagatgctggcggaggaaggccccgccgacgacggccagcagagcatgtactgacccggcatgaaaacttcacatttattcgctatgatagaaaggagctgccgccatgcgcgccgcccaaacctggcaggattatgaactcatcgacgcaacggagaaaaatcgcctggaacgctggggaaagaccatcctgatccgtcccgacccccaggtggtatggaaaaacgcccccgccagccccctgtgggacaaggcggacgccgtctaccaccgctcttccaagggcggcggcagctgggagacccgccgcagcctgccccagaaatggcgcatccgctggcaggacctgaccctcatcgtcagccccaccggcttcaagcacaccggcgttttcccggagcaggccgtcaactgggagtggtaccgcaaggtcatcaccgccgcgggacggcccatccgggtgctgaacctcttcggctacaccggcggcgcgacgctggcctgcctggccgcgggagcatccgtcacccacgtggacgccagcaagggcatggtggcctgggccagggaaaacgccgccgccagcaatctgcaggaccgtccctgccggtggatcgtggacgactgcggcaagttcgtcgcccgggagatccgccggggcagcttttacgatgccgtcatcatggacccgcccagctacggccgcggacccggcggcgagatctggaagctggaggacaacatctacgacctcatcgcccagtgcgtgggggtgctgagtgagcgtcccctcttctttgcggtgaacagctacaccgagggcctcagccccgcggtcatggaatacatcatgaaaaccaccatcgtgccccgcttcggcggcgccaccagctgcgacgagatcggcctgccggtgtcggccaccggcggcgtggtgccctgcggcgccaccgccatctggcaggagagctgaacgggggaggcagtgccatgatcctctttttcaaccgcaaaaagttttacacctgcaacgaccctcaggatgccgcccgggtgtgggcggccctgaaggcggaacatattccctatgaggtggataccctgcgcagccagccggcgctggtcacaaactttcatgcccagatgggcatgcgggggatgagcggcaattacacccccggccagtttaccgaccaggtcaccctgacctatgtgatttacgtgcgccgggcggacctggcagccgcaaaagccgcgctggaagcccaccccaatctgcagtgaccgcaaaggcggcctatcaggaaaggaaaaccatcatggaagagatgctgcgcgttcaggacgtgcatttccgttatgaccccgaacagcccgtgtgggcggtgtcgggggtgagcatggacatcaagaaaggcgagtttgtggcagttttaggagccaacggctgcggcaaatccaccctggccaagcacttcaacgccattctgctgcccgaaaaaggcacggtgctcgtcgaggacatcgacacccgcaccgaggaaaagctctacgacatccggcagaaagtgggcatggtgttccagaaccccgacaaccagatcgtcgccaccgtggtggaggaggacgtggccttcgctctggaaaacctgggcgtgccttcccccgagatccgcacccgcatcgacgaagccatgaagctggccggcatctatgaaaagcgggacaaggccccccacaagctgtccggcggacagaaacagcgggtggccattgcgggcgtcatcgccatgcggcccgactgcctggtgctggacgaagccaccgccatgctggaccccagcggccgccggtcggtgatgaaaaccatccataagctgcgggcgtcgggcatcaccatcgtctccatcacccactatatggaggaggccgcccaggccgaccgggtgctggtcatgaacagcggccgcatcgttatggagggaaccccggaggagattttcgcccagaccgagcgcctgaagcgctatcatctggacgttccccaggccgccgagctgcgggacgccctggaagccgagggcctgcccgcgcccaagcgcatcatcacgccggacgccgccgccgactggctgtacgaacttttgaaagactgaacaactgtttacaccaaagatgggaacatcacccgggcagccggggatatatctcatgggaacagggggaaccgctttgtctgagatcattcgcgttgaacatctgaaatacgtttacaatgccggtatgccggacgagaccgctgcgctggacgacgtcagcttttccattgaggaaggggacttcgtgggcatcatcggctccaccggcagtggcaagtccaccctcatcagccatttcaacgggctgaaccgccccacttcgggcaagatcatcgtggacggcaaggatatgtgggcggagggcagcgacctgcgctccttccgctttctggtggggctggtgttccagtacccggaataccagctttttgaggagacctgcgccaaggatatcgccttcggccccaagaacatgggcctggacgacgccgagatcgcccgccgcgtcaaagaggcggcagcctttaccggcctgagcgacgaccttttgcagcgcagcccctttgaactgtccggcggccagaaacgccgggtggccattgcgggcgtcatggccatggagccccgcatcctggtgctggacgagcccgccgcgggtctcgaccccgaaggccgggacaccatcctgtcccagatccgcgcctaccatgaaaagaccggcattacggtggtgctggtcagccattccatggaggacattgccaaatacgccaaccgcgtcctggtcatgagccacgccaaggtggccatgtacgacacggtggaaaacgtctttgcccgtgcgccggaactgctggaactggggctttcggtgccccaggtcacccagatctttttgaaactgcgggagaagggcctggacatccccatcgacgtctacaccgtcccctacgcggtcaagaccatccgccgcctgtggcaggcaaaacagagcaaaggaggcggcgcagatgcttcgtgatatcaccatcggccagcatttcccgggcaattcggtggtccaccgctgtgacccccgcctcaagctcgttgccaccgtggcctatatcgtggtgctgtattcctgcggcaccgccgtgggcgtggcgctgtcggttttgctgctggcagccctgtatctcctggcaaaaatccccttcaagctcattctcaagagcctgaaacccatcgtccccatcatcattttcacctcggtcatcaacctgttcttcatcaccggggagggggaacccctggtctccttctggatcttcaaaatttatgccgagggcgtcagctttgccatcctcatggcggtgcgggtcatggccctcatcgcaggcaccagcctgctcacctacaccaccagcccggtggtcctgaccgatgccatcgagaacctgctccggcccctgtccaagctgcatctgccggtgcatgagttcgccatcatcatgaccatcgccctgcggttcatccccaccctcatcgacgagaccgagaagatcatgaacgcccagaaagcccggggcgcccagctggataccggcaaactcagcgagcggatgcgcgccctggtgcccatcctcattcccctgttcctgtccgctttccgccgcgccgacgagctggccatggccatggagtgccgttgctaccggggcggcgagggccgcacccgcctgaaggtgctgcgctttacccgcaccgacgccatgtgcgccctgttctgcgtggtgaccttcggcatcattctggccacccggtggatcttccccggcctgtgaccggacaaagagaggtttttccatgaacgtgctgctccgcctggcttacaaaggcacccgctatgcggggtttcaggtccagcccaacgcccccaccgtctgtgcggcctttcaggacgcattgcaggcggttttgggggaacgtcccgacgtaaaaggctgctctcgcaccgacgcaggcgttcatgcgctggatttcgcgctcaacttccactatgatggacacattccccctgcccggctggtgctggccttgaacgcccacctgccggaggacatccgggtcaaaagcgctcagcccgtgccggaggacttccatgcccggtacgctgcccacgccaagacctaccgctaccgcatccgcaacagcgcagtggacgatccctttgatctggacacctgctggcggacggcgggggcgctggacgtggccgccatgcaggcggcggcggacggctttgtggggacccacgatttcaaggccctgtgcgcggcgggctccggcccggcggcccacggggacacggtgcgcaccatcaccgcctgcacggtggagcggcagggggaactggtgaccgtcaccgtcacggcggacggctacctgtacaacatggtgcggatattggccgggacgctggtggaggcgggccggggcaaactggaccccgccgccgtgccggacattctggcaaaaggggaccgccgcctggcgggacccaccctgcccgccaaggggctgttcctccttcgggtggactaccccggcggcgcgctgcatcccacggagggcggcgcataagatgaatttaccgctgcgcttgcggcggccaggaaaggaggggcggctgtgaaccgcgaagaaaaagagcgccgtgccagaatgcagcgcatgctggcacgggaccgcggcgagaccctgccgcccgataccgaacccgccgccccggaacagcccgctgccccggcggccccccgccggagcaaggctgaccgggaagcgcagccttccgggcgggaaggccggccggtgcgcaccggcaacacccggcctttgagccctattttacagcgccgcaaacggcgcaagcgcaacctgctcatcgccctggtggcggtgatcgccctgggtttcgcggtgcttaccggcgtgttcagcacctccattgccatgctgggagatttggccgacagcatcgccctgacctttgaaccgggcggctggccggcctccaccggcatcaccgatcccttgcaaatcgaggaactggccgggggctttgtggagctggacgccaccgacgtggcggtgttttcctcccacggggccaaggtgcgcaccatccagcccggctacgcccgcccggccattgcggtgggcaacacccgctttgcgctgtacaaccgcgccggggccgagctgcgcatcgaaagccgcacctccaccctgtatacccacaagttttcttccaacatcctgctgtgcgccatgagcaccaacggcaccaccgccgtggtgaccgagtccagccgctatgccgcctgcgtccaggtgttcgaccccatgttcgacctgctgtacgagtggtgtcccacccagactgacggcaccccggtggccatggcctttgccagtgacaaccgccggtttgcggcggggtgcctgtcggcatcggaaggccagctgtgcaccaagctgtttttcatggacctgaacgccgatgagccggtggccacctataccgccgacgcgggcagcatgatcctgcacctgtactggctgtccgacagccgggtgctggcggtgtttgaggactttgccgtcctgctggacgccaacgacggcagcgaggtggcccggtacagttataacggcggctctctgctggacgtggataccgcgggccggggtgcggcgctgctgcttgccggccagagcgacaccacccttgtggtgctgtccaacgaactcaaggaactggcccacgtggatgccggagccgctaccatgctctgctgcacccgcaccaacatttacctcgccggcggcaatcaggtgcgccgcaccggctacgacggcgagaccgactgggagcagacgctggacaatccgcccatcgccctgctcaacgcatcctcgccgctgatcttcagcggcacccaggtctggaccctgtcctgaccccgtgacccctatcccgaaaggagaaccgatatgcctttgtcctttggcctgatctatgatctggtctttgccgccatccttgtcatcaccgcgctgcacggccgccgtcagggcctgctggccgggctcatggccctggccggtgcggtgctgggcatcgtgggcgcggtgtgggccgccagctggctggcccccatgatctacgccgaccacatcggtgtggcggtcagccagaccgtcaccgatgctctggtgaaccagggcgagaccctgtccgtcgtcatggaacagtatctgggctttctgcccaaggaactgtttgaccaggtcctggaacagctccagcttgccctgcaaagctccagcgccgacatctcccagcaggtggtggaagccctggaacccatcttcctgccgctgttgcaggcggtcattttcctggtgctgtgcaccctcatccgctgggtgttccggctgctggcaaaacttttgcgccactgcaacgacctgcccctggtgggcggcgtcaaccggacgctgggcctgctgctgggcctggtcaccggcgccctggactgctggatgctcagcctgcttttgtggggcgctgcgtcggtcaccggcggaagcctgagctggctttcccccgatgtgctgtccggcagcatgctgtacagcctgttcatcggcttcaatccgtttttgctataaccgtataatcatggtaagataaagatgccgggcggcggcggaccccgccgcctgcgcctcttttccgccgtagggctccgacttggggccgcgcggtgataaagcggctttttgccgcattttgtatcgagggagggaaccctatgctttgtgtccgttgtaaaaaaagaaccgccgtggtgtttgtccagcgtatggaggacggcaaacccatccaggaaggctactgcctgacctgcgcgcgggaaatgcatattcagccggtggatgatctgatgaagcgcttcggcgtgtcggatcaggacctggaaaacatggaggagcgcatgtccagcttcctggaggaagctgcccagaacggcgccatgatgcccgcggaggacggcggcgaaccggaggagtttgtccccggcggaagcccggtgttccccttcggccccggcgcccaggccgagccgcgctccgacgacaagtccggcaagcatggccgggacaaaaaacaggagcgcaagttcctgaacaattactgtgaaaacctgacccagaaagcccgggaaggccgcatcgaccacatcgtcggccgcgaccgggaaatttaccgcaccatccagatcctctgccgccgccagaagaacaacccctgcctcatcggtgaggcgggcgtgggcaagacggccatcgccgagggcattgcccagcacatcgtggagggcaaagtccccgcccgcctggcagacaaggagatctatctgctggacctcaccgccctggtggcaggcacccagttccgcggccagtttgagcagcgggtcaagggcctcatcagcgaggtccgccgcgccggcaacatcatcctcttcatcgacgagctgcacaacctggtgggcgtgggcgactcggaaggggccatgaacgccgccaatatcatgaaacccgccctctcccgcgggcagatccaggtcatcggcgccaccaccttcaccgagtaccgcaagtatatcgagaaggaccaggccctggaacgccgcttccagcccgtcaaggtggatgaaccttccatcaccgacagcatcgaggtgctcaagggcgtgcgggtctactacgaaaaacatcactgcgtccgtgtgccggatgcggtggccgccagcatcgtccgcctggccgagcggtacatcaccgaccgtttcctgcccgacaaggccatcgacctgctggacgaagcctgcgcctgctgcaacctgcgccaccccgagatcaccgagttcctgaacgcccagaaacaggtcaccgccctggaagcccaggagcatgacctggaaaaccccgaggacggcaaggccatcgactacgaggccctggccaaggtcaagaccgagctggcccgggtgcgggaaaagctgcccgccctccagctgcgcaccgccgacatcgccgtctccatggacgacgtggcccaggtggtggagctgtggaccggcatccccgccgtcaagatcaaggagagcgagtacggccgcctgctggggctggaggacgccctgaaagcccacatcatcggccaggacgaggccgtccacaaggtggcccaggccgtcaagcggtcccgggccgacctgtccggccgtcaccgtccggccagcttcatcttcgtcggccccaccggcgtgggcaagaccgaactggtcaagcagctggccgcccagctctttgacaccgtcgaccccctcatctccatcgacatgagcgagtatatggagaagtatgccgtctcccgcctcatcggttcgcctccgggctacgtgggctacgacgaggccggccagctcaccgagaaagtccgccgccacccttacagcgtggtgctgtttgacgagatcgagaaggcccaccccgacgttatgaacatcctgctgcagatcctggacgagggcaagatcaacgacgcccagggccgcaccgtggacttttccaacactgtcatctgcatgacctccaacgcgggcagcagcgaccgttcgggggagaccggcttcaacaagaccgccgagcagatcagcgccaacaagagcatgaaggccctgcaggagttcctgcgccccgaatttctgggccgcgtggacgagatcatcaccttccgcccgctggagcaggcggacctggagcgcatcgccgccctcatgctggacgaatacaagcccggcatgcaggcccacggcatcaacctggaatacacccccgaggcgctgaccgccgtggtcaaggagaccagcaccaagttcggcgcccgggagctgcgccgaaccatccgcaaagaggtggaggaccccgtggcccaggctctcatcgagggccgtctgggacaggggacttcccccgactccgtcgtgctggaagcacaggacggcaaaccggtcctgcgcctgccgcagtgacaacgccggaaagggaaacaacaccatgcaaaaggagaagcgttcccgggcggcctttgccgcggtgaccctggccgccgcctttctgctgacgggctgcgcgccctccgccccgctgaccctgtccagcgcggcgggacgttcccctcaggactggcccatgcccgacgactggtatgacagctggtacggcggctggggcgacagctgggaggactggaccatgggtcagggctccacggcggagcagtgccgctacggcagcgctgccctgatcgcctggcccagcgtgctggtcagcgtctatctggacgaggcaaacggcgcctcctgggacgaggaggccatcgccgaaagccgggagagtctcgccgtggccgtggactggatcgaggagcagtgcgccctgtacaatacctccccctccatcacctgcgacgacggcaccccggacaacgggctgttctatcacctgacctacaacggcagttttgcgggcggcaccgactccgacgagagcgaggacttctacgccgccgcctacgacatctgcgcccagctggacacccaggagctccatgagcgctacggcacttccaacgtgggctttctgctgtttttgccggtggacggggcctccttcaccatcgttcactatatggaggacggctcggactactatcacgagttcagctgtctctaccgctacgacgcttacagcggccccggcgcggcggagacgcccgccgtctatgcccatgaaatcctgcatctgttcggtgcccccgacctgtacgagggcagcaccgattattacgtcacgccggaactgaccgcctttgtggaggagacctggcccgacgagatcatgctggatacctacggcccgggcggcagcctggtgtacggcggcatcgaaaagcagatcagccccctgaccgcctaccggctgggtctgtgcacccggtttgaggggatggagaccttcccccaggtgacggaactgcccgcgggggccttttccgcccgcacgccgggggaggacgcccgtctgccggacggcgccgtggcggcccgccccgcagcctgacagaggggaggacatagcctatggacggcagcgagaacttccccctgctcatcgagcagatctccggcgcgggctgtgaggagtggcgcgtgggcgacaccctgcccgaacgcctgtgtgaaaactggcagatggtctatctgttcagcggcatggtggaggaacacggcgacagccataccgtgattttgcgggcggggcagcttttgttccaccgcccgggcgagacggtctccatgcgcgccgtgggggaggttccccccgaggtgctgcgggtgggctttgcctgttccggttccgccatggacgagctgtacggccgcccgtggcgcatcgacctgaccgagcgcctgcgcatgcggcagatcgccgccgcggtgcgggatctcttcgtgccgtcggaggaggcgggcgccctgcccgtgcgccgggcggaaccgcctttcggcgcggagcaggttttgtgctattatctggggctgatgctcatccagctggtccgcgcccgccggcgcacccggcggctgagtgcccgcgcccgccaggagcgggaccagcaggccctggtggaccatgccagagtgtatttttccaaaaacctttcccgggaactgacggcggaggaagtctgtcaggctctgggggtcagccgcgcccggctgcaaaaggctttccgcgcccggctgcgccgcggccccatggaaacctttgccgccatgaaaatggagcgggccaaggaactgctggccgccggatgcacccccggcgaaaccgccgagcgcctgggctttgccgacggggcgtacttttcccggtgtttccgccggtcggagggaatgtccccccgggagtttttgcgcaagctgcgcccggcggacgccaagaccgcaacaaaccgacatgcggctccctcaaacgtccatgtaataaagccgggcggtgaagtagaataaaaacagaaacaacggataacccacggtaacagcgacaaaaaatcggaccgacgccgaaaaaaccatcccgtaccaacagcgggacgtgatttttgcggcaacaaaaatacaaacaaaaagaaggagcgagttctatggcaattctggtcagcggcggcgccggatacatcggcagccatacctgcgtcgaacttctggaggccggctacgacatcgtcgtggcggacaactactacaactcctgccccgaggctctggcccgcgtcaaggccatcaccggcaaggacttccgctttgtggaagccgacatgaccgacaaggcggcggtggaagccctgtttgccgccaacccggacatcgactgcgtcatccagttcgcggcctacaaggctgtgggcgagagcgtgtccaagcccatcgagtactactccaacaacctggcctgcagcctgaacatcctggacgtcatgcgccgccatgactgccacaacttcatcttctcctcctccgccacggtctacggcgaccccgcttccgtgcccatcaccgaggatttccccaccggtgccaccaccaacccctacggcaccaccaaggtctttaccgagcgcatcctcaccgactgctgcaccgccgaccccgagctgaacgtggcgctgctccgctacttcaaccccatcggcgcccatccctccggacttatcggcgaggaccccaacggcatccccaacaacctggtcccctacattgccaaggtggccgtgggcaagctggaaaaggtccatgtctacggcaatgactaccccactcccgacggcaccggcgtccgcgactacatccacgtggtggacctggcccgcggccatgtggcggcagtgaaaaagctggagcagaagcccggcctgttcatctgcaacctgggcaccggccacggttacagcgtgctggacgtcatccatgccttcagcaaggcctgcggccgggaactgccctacgtcatcgatccccgccgccccggcgacattgccgagtgctgggccgatccctccaaggcggagcgggaactgggctggaaggcagagtacggcatcgacgagatgtgccgcgacagctggaactggcagagccacaaccccgacggctacaagacccaggcttgacccgggccgactggctgccgatccatacaaatacaacaaaggcgcagaccccgcggggcctgcgcctttgctttgtgtttgtgaaattttgttttggaagaaacgcctggcagattttcccgtttttatggttgaccggcgggaaaaactcagcggcggcggaccagcatgacgatgcagatcagcagcagcatcagcgcgcccgcgccgatgaccagcagcacgatctcgaacacctgcagactgaacccgctctggaagccctgggccgcgccggagaagatctcggacacggtgctgccgctgttggcggtctcgctctcgccgtcgttggcgctcagggccgcgctggcggcgctgtcatcccccatggccgacaaaaactgggaaagctgatccccggccattgtgatcatccgggtgtcggagtcgctcttgaccttctcgccgttcacggccccggacaggtactcggcaaagacctggcaggcgccctgcaggggagcggaggcttcctcggcgatggtccagccgtcgctgacccacatcccgttgaggtagagcagcagctgcatgccggtgtcctgggtggcggcctgatagacctcgttggcaaagtccgtggtgttgccggtgttcacgtccccgaaggtcagggcaatgaactggtaggcacggtcgtattcattggcggagctgtaataatccttcacggcctgggcaacatcgccgccctgactcaggccggagccgatgatgacggcgtccaggtcagcccggagatcatcgccgccgaaggtggaattttcatcctcaaaggtgttgctcatcagctcggcatagccggcggcatcggaggcctggcccgcgtactgctgggcaagctcggcacagtcgccgccccagctgcccaccaccggcaggccgcggtagaccaggttgatggaagccagcagatggccgaagtccacgctgcccgcggaggtctccacgctgcccagctcctgcagggagatcaggtcggggtcctgctcctccacgtaatcctcaaacccggcgtcgcgggcgcccgcggtcatctgccacagggcggtgttgtaggtccccgtccgggtgtaggacagggtcagctcgatggggtcaaaagactcggaaggattgtcgtcggcatactgctgcgccagcgcctgaaggcgggaaaggccgtcgatcacggtgtcgtagtcctccgccgccgcgggcagagaaaatgccgccatcagcacaaaggctgccagcaggccaagcagacggatcttcttcatcgttttgccaagcacctccgcagaaaaaagcaaaaaaggatccggggcacctgccccgaattaccctgtttgatcaatgtctgtaacctacacagtataccataccggcaccgcgctgtcacgtgaaaattttgcgtaggagagttactcgcaaaaatttacatcccggggccttttgtttataagcgcggcatgatatgatagagactgagaccatcgaaacctggcgaaaagaaggaggatgccaatggcgcccatcatccgtaccgtggggctgcgcaaagtctacgcggtgggcaaggagcgggtcgttgctctggacaatgtggatatcagcgtggaaaaaggggagttctgctgcatcgtcggtcagtccggcagcggcaagtccaccctgctcaaccagctggccgggctggaaaagcccacccggggcaaggtgttcatcggcaagcacgagatcagtgccatgaccgagaacgaactggcggccttccgccaggcgcatctgggctttattttccagagctacaacctgctgcccagcatgaccgcggcggaaaacgtcgcgcttcccctgatgttcaagggcatgggccgcaagcagcgccttgccctggccaagcaggaactgaaaagcatggggctttcgtcccgcgtcaaccatctccccaccgagatgagcggcggccagcagcagcgcgtgggcattgcccgcgcctttgtcagccggcccaaggtcatttttgccgacgagcccaccggcaacctggacagcaagacctcccgtcaggttttgctgcgtatgctggaaatgtccaaaaaggaacagatcacctttgtcatggtcactcacgagccgtctctggcggcctgtgcggaccggatcatcaccattctggacggcagagtgcagagcgatgtggtcccccccgaggaggagcgcatccgccgccgggaggccctggccgccgagcttgcccaggccgaagcggaggaagccgccgccgaagcccgggaaaaggccgaaaaaggcgagcagcccccgcaggcacagcaacccgaaaaagaacccgcggctgatgccgcggtaaaataaaccggacgtatcatttccgttgaaggaggatccccctgtgaaaaccacctctcgtattctttccatcggcgtggccctgctgctgttgatcagcctgtgcgccctgcccgtctttgcggacgacacttcgaccaacccgcccgtgaccaccagcgccgacggcgtctatgtcacggcggccaccgtcaccgacattgccggcggcgaggtcaccaccgtggagcgggacgaccacatcaacatcgtgctgcgggtggtggaccactcctcggccaagaacaacgtcaccgccgatcagatcgtcacccgcatcaactcctcggtgttccagtacaccggcaccggcgagatcagccagctggtggagggtaccgacgatgccggcgactattacagctatgtccttctgttccgggacgtgatctacgccggcggcggcaacaccctgaacatcgacctgagctatctggattcctccatggccatgcagcagtttgccgtgaccatcggccagtgcctggacgaggaccccaagacccccaacctggtcatgcgtgagtccagctacggcaccgacgccgtcaccgcgggcacgcccttcaccctgagcgtcaccgcctacgccaccgacggcgacgagtccctgtccgacgtcatcgtctcggtcaccctgcccgacggcatcaccctgaccggcggcagcctgtccgaatatgtgggcaccatgtccgccaagagcacccgggatgtcagcttcgcggtgctgccatctgcggcgtacaccggcggcgtggccaacatcaccgtcaacatgaccggcaccggcaccgagtccggcactgccgtcaccggcaccggcaccatctccatccccatctcccagcccgaccgctttgagatcaccaccatggaaatgtccgacaccatctatgtgggcgagaccacttccgtcacggtgaactttgtcaacaagggcaagaaccccatctccaacctggaagcctccatcaccggcgaaaacctgggcgtggatgtctcccagcagtacatcggcaacatcgccgccggctccgagaacagcgtcgactttgacctgactccccagcaggccggcgagatctccggtaccatcaccctgacctacgaggcgggcgacggcaccaccaagaccctgacccaggacttcagcgccaccgtgcaggacatgcccgtctatgaggaccccggcatgatcgaccctggcatggttgagccggagcccaccggcggtatgcccgtctggggcattctgctcatcgttgtgggcgttgtggtggtcgtcgtgatcgttgtggcggtcatccgcaaaaagaagaaggccgccgcccttgccatgctggaggacggagatgaagatctttgatctgatcgcgctttcggcgcggaatctttcccgccgcaaaggccgcaccgcgctgacggtcatcggcgtggcggtggggacctgcctgatcatcgtcatgatcagcttcggcatcgccatgaaccaggccaacgaggccatgctggccagctggggcgacctgacccagatcgaggtatacggcggcggtaacgtctactattcctcgggcagcggaactgcggtcatcggcggaagcagtggcggcggcggggaccagcccgcggtgctcaatgacgagatgatcgccaactttacaaaaatggaccacgtgctggccgccacgccgttctatcaggcgtattccctcaacgggaccatcacggcgggcaagggcgaccggtactcggcctacctgggcaacgccgtgggcgtctacgccagcgccatggagcccatgggcttcaccctggccagcggggactggctgtccgacaccggcagctatggccgggacgtcatccccatcatggtctgcgagcagaccggctacaattttgaggacacccgcaaaagctacaactcctccaagcgctaccgctggtacggccagaccgatgctgcgggcaatctgctggacccctttgtggacgtgaccaaggacgaaatgaccctgaccctgtccaacggcgaccccgataaccccaagaccaagagctggaagctcaaggtggtgggcagcatcaaccccgacaccgccaagggctggtggacccagagcagctttatcctgcgcatccaggacatcaagatgctccagaaggagtacaaggacctggcgggcaacgatgcctacggcaccaacaccgaaagctacgatcaggtgtacgtcaaggtggacgacatggacaacgtggaggaagtggaccaggccattcaggacctgggcttcagcacctactccatgacccagcagcgggaagccatgcaggagcaggtctcccagctgatgctcattctgggctgtctggcggcgttcagcctgctggtggcggccttgaacatcatcaacaccatgaccatggccatctacgagcgtacccgcgagatcggcgtcatgaaggtgctgggctgtgctttgggcaagatccgcatgatgtttttgatcgagagcggattcatcggctttatcggcggcgtgaccggctcggtcatcagcctgctcatcagctttgtgctcaataatatcaccctcattatgtccatcttcggcagtgagggcggcggttccaacattctgaacaatctgggcggtttttactacggcggcggcagttccgctgtgtcggtggtcccgccctggctggtgctgctggctctggtctttgccaccatcatcggcctggtggcgggtattctgcccgcggcccgggccaccaagatcagcgccctggaagctatccgtcacgaataaaacggataaattatacaaaatggaaaatccctcggcagcctccccatggtgggagagtgccgggggatttttgtgcagaaacggtctggatggcccgcccgcgcccgggcggcggggacttttgcgccgccggaaacaccgcccggagaccgggaggctggatgagccgaatgataccgggtgatgccggacaaccccggacaacgccgtcaaagggcggcacggcggagcggcttcccggatgtatggcccttgcgaaaaggggacctgcggaacggacagagggctcagcggtccttggtgaactcgtacagcagggagttgaggatgtccagctggcggggtgtcagggtgcgggggccgtgagggttgggactttgcagctccaccacgatggtctgtaccaggctgcgctgggcgtcggacaagccctcggaggagatcatctcccgcttgtcgatgcccgccagataatccagggagacgccgtacagggcggccagactggtcagcacgtccaggggcggggtgcgcaggttggcctcgtagctgctgatgaccgatttcgccttgttgaccttgcggcccagagcctcctgtgaccagccttttgccttgcgaagcgcctgaaggcgcgcgcccatatcgtacataccggtatcctccccgcaacagttgttacaagtagtctaccgtattgacgttctataaatgctgacttataatatgtagtgttaactaaaacagaacaaaatgcgggaaaatcataaaaaattccgcccggatgaaacaatatccgcatttccggacacaaatacatcaaggacaaaacccttttggacaggcaaaacgggaaaggatacaggaaaggacgccacaacatgacacagcagccggcggcctgccagatacaggccggaaccaaacttttgtataagaatatcgaactggacacggcgtcgggcctggtgtgcaaggacggccgcccggtggagctgtcccccaaggagcggtgcctgctggcctttctcatcagccaccgggggcaggctttttcccgggcggaactgctggcctgcgtctggggcgtgtccatgcccctgcgcacccgcacggtggacatgcacatccgtcagctgcgccgcaaactgggccctgagctggacattgtgacggtgttcaaggtgggataccggctgacctgaaaatccgcatggtggctcgcttccctgaaagccgggctgaggggaaacggtccaggcactgcccgtcaccggatgagggggcttacggcccgggcggggtcggcagagccttccgccttgtccgtcctgcatctgccggttggcagcccttgcacggcctggtgtttttcttatgggagcgtaaatgtggctccctggataccgcatcacaaaccagggccggagccatctgacaaaaacaaagccgctgacgcccaggggaaagcccccggggagacagcggacaaaatacacacaaaaaagtcggcgcggagaagttctccacgccgactttcggcattcaaaaccaattactcagctttgatcgcgccagtggggcaagcgccctcgcaagcaccgcagtcgatgcagctgccagcgtcgacgacagccttgtcagccatgctgatcgcgccaacggggcaggtgtcaacacaagcgccgcaagcaacgcactcgtcggaaaccatatgagccattgtgaaactccttatctccgtgctgattgtattttgccaccggcaccctgcacggtcggcagcccggcggcggcaagcaaatgggttgttttcagccctacttgttcagaaatattgtaccatccgggcacccggtttgcaagaccaaagcggtaaaaagcaccggcggtatcccggaacaaaaaggaaacttattcctctttgccgctgcccgcctcggggtcaggcttgcggggcgcacggcgtccgccccgcaggtagacgcattcctcccgcttgtaatatttgggagccaggctttccacattgctgcgcaccttgagcatgccggaaatgacgttgacctcggtgacggtgccttccccgtcgggggtgcgcaccgtgctgcccaccggcggggtgatggagttcagatactcgtagctcttctgctcgtaggccaggcagcacatcaggcgtccgcaggcgccgctgatcttggtggggttcagggacaggccctgctccttggccatcttgatggacaccggctggaagttcttgaggaaccggctgcagcagaagggctggccgcacatacccaggccgcccagcatcttgctctcgtcccgcacgccgatctggcgcagctcgatgcgggtgtggaaatgggaggccaggtccttgaccagttcccggaaatccacccggttgtcggcggtgaagtagaagatcagcttgctgcggtccagggtgtattccgcgtccaccagcttcatggccaggccgtgggcggtgatgcgctgctcgcagatgcggtaggcgttgcgctcgtcggcgtggttctggcgcatacggcggatatccacgccgtccgccatgcggatgaccggcttcaactctttgttgaacccgttggaggagacctcatgcaccccgcgcacgacctcgccgcactcggtgccgcgggcagtctccacaatgacgaaatccccgcggtggatctccatggtgccgggatcaaagtagtagacccggccgctctccttgaatttgactgaaatgactttcatcttgttgttccttttatcttgtgattacccgcagctctcggcggcaaagaccgtcagggtcagccgcaggttgccgttggcgcggatggcctcccgggccttggcagcggcgttcagcagccgctgggcgtgtttgggggcaagcccggcgtacccgggtctgcgcaaagcgccgctggccagacagcaggcctggctcagcaccgcctgggcggcggcacggtccttttccagcccggccatgagggcggcggcacggtaggtgtcgtcctgctccgccgccttgcagaaatcccgcgccgtctgtaaggcggtgcgcacggcactgtcctgtaccgcgtccaggcaggagccgatatgcccctcgtacaaaaaggccagatcgtcggcggcgtcccggttcagctggggcagggaggcccgcagcacggcggcacactcctccggcgggacgggggccagggtgtaggcggcgcagcggctgcggatggtgggcagcacgccggcggcactggtggccgtgaacaggaacagcaccccctcgggcggttcctcaatgatcttgagcatggcgttggcggagctctggttcaggtcctgggcgccgtagacgaacagcacacggcccgccgcatcctccgacaaagccgaatgctggatggcctcccgggcggcgcggatgcgctccaccttgatctggccggaagcgccctccccccgcagggagatgcactcggagtcctccccccgcaatacggcctcggcatgggggccgcctgcagggtaaagatagtccgccgcaaggcagcgcgcggcaaagccggcgccgcatccgcgttcgccgaccaaaagaatgctgtgggccaggcgtccggcagccagcgccgacgccaggtccttttttaaggccgcattgccggccagacggtcaagcatcacagcttttcaaaacgctccacgttggtgacaaagacggtggcgccgcccacggtgacctcgatgggcatggcgctctcgatacccagaccgatggacgcagtgccgggaacgatctcggtgcgctgcttgcagcacttggagatgcaggcgatgcagtcgtccacacgctcgtcctcggtgccgatgagcagggtcatgttgcccgccatcaggaagccgccggtggtggccaggcgggtgacgtaaaagtgggcgcgcagcagctcattgcagacggccttggaatcttccttgttgacgatcgcggtgataagtttcataaaacgatccctccttggggtttttgtgatagggttgcccggcagaacgggccatccgggaacgaaaaccgtttccggcagatgagacaggggaaaagcgccttacttccagcggttgttccagtcccggcggcgcttgtagctgaccacggtgtcacggcaccagcgccacagctccggcccgaagaagagcaggaagcccgccaggccgaacaccaggcttagcttgaccgacagggtgccgaagatgaaatcgatggcccagaacacggcggcggcccagcccagccacttgactttcagcgggatgatgaagaagagcaggatctgctgatccggccacatccaggcgtaggcgaagaacaggctgaggaacagaccggaggtggagccgtaaccggtgatgaggcagctgagaatggcgcccaccatgccggccagccagtagaccatgaagcggaaatcgccccaggcgcgctccagcgagttgcctacccaccagtagaaatattcctccagaatgaggtagaggatgcgggtggtcagggtcgggataaagacgaaggtcaccgcccgccacagctgcagatgagcaaggccgtcacgggtcagggtgagcaggtcgtagatgtgatagttgacgaacatggtgatgaaccagaccaaaacctggccgatgatgacaaggttcatcaggttggggatgctccagcggccgaaccggcgctcgagacgatcaagccagcgcataatgcctccatagctttttgttgtacggcggacattgcccgccggaggttgttttgtccgtttattgtagcattttccgggagtcagttcaacaatttgttgaggcccctgcggtgcaaaaaccggtcgaaatgatacgttttggaaaaaccggaacgtttttaacagtttcaacagagttttcaacactttcaacgtggaatactcgtatacgatctgtaaaatcctttttgcgcataccgcgtgaaccacccggccccgcatggaaatttggaccaattttgcaaaaaggtattgcaatgaatatatgacgatatatcgcggaaaatatacgccgcgccgggctgcggcacagtgcctgcgccgcccggcgatatatcttattatacgcctgcccggccccgcttgcaatcgaaacagggtgaaaagaccggggaagatatgccttgccccgcaggggccggggatggtatactcttggtggaaaaccctgtttttgtggaaaactttccgtcccggacggcaggaccgccgtttttgggagggcggcggtggaaaacagggcggcaacaggcaaaggagcgaactgccgcaaggcggcccgccctaccggggaaaggagtctgacgggggatgctgtacgtgacgggagacctgcacggcgacggtgaggaactgctgcgccgcgcccggcctctgcgcccccaggataccctcatcgtctgcggggatttcggccttttgtggcgggggacccggcgggaacgcctgcacctggacctgatcaacgggcggctgcattgccgcgtctgctttgtctgcggcaaccatgaaaacttcgacctgctggaacgttaccccatcagcgggtttgcgggcgggctggtgcaccgcatccggccgcgcatctatcaccttatgcgggggcaggtatttgaaatggagggacgcaccatctttaccatgggcggggcgtcctcccatgacattcccgacggcatcctggacccccgggacccggatttcgccgccaggcggcgactgctggacgcccggggcgggcattaccgcatccggcgggtgtcctggtggccccaggaactgccccggccaagggagctgtctttggggatgcgaaacctccagcggcaggactggcgggtggactatgtcatcacccactgcctgccttccgcggtgcaggacgtgttcagcggcgggttctacacccacgaccgcctgaccgactatctggagacggtgcgccgccgctgcgagtttgaacgctggtactgcggccactaccaccacgaacggctgtacggcggccggtatcaggtgctgtaccagagtgtcctgcccatgtggtgaaggccggaccatatcaatataaagataaagcgccccgtcccggcggatgccggggcggggcgctgcgcattgtacaaggagcagaggtaaggccgggcggcaaggggatgcggcgtcaggcgggtccctccgcgggggctgcgggcagggcccagtcctgaagcagcgccgaagcgccgtccgcatagtttaccgtcaccaggaaggtgtactcctggctgggcaggctgccctgggggaagcagaccgtcacatactccgggaaaaagaccagacattccggggtgaaggctcgggacatctcctgccgcaggtccggctcggtgatctgggccaggtccagcagttggggaaggacatcctcccaggggcaggtgaacagctcggcggcgggaatgaagtcgccggtggccttgtcaaaggtagcgccggtgcgctgctcatacatcagggaactgcccgccgggaaggatacagaggtcaccaggtaaaagacccggtcgctggcggcggaaggggtgacctcctgagccagcatgggcgcttcaaagggcgtgtccccggcggccagatagtaggcataggtcttttccagctcggcctgttcgtcgtagagcatgccccggtcgtcgtaccaggcgaggatcttgtcccggacctggacgggcaggctgcccagactttcctggccgaccatatagtcggccgacgggccgacaggggtgtttacccgcaaaagctcggtgccgtcgggcagaaaataggtcagataccgggaggactgccagacttccagctcagtgccgtcggacagacgggcagtgtcgggcaggtggcaggcttccacctcaatatgggtggcgttgtaggcggtaagtttttcgccctcctccgtgaccagggagcggcgggacgggtcgtaagtcaccgtcacggtcacgtcggtctgcgccccgtcccggaaggcgtcggcatccagcccgtccacaaaggtgaaaatatgcgtctcgtcggtgagcaggatgcccacctccttgtcccggtcggtgcggaccacaaaagaaacaaggccggcacccgggtcggtgtcggcctccacaatgcggcccgacacactgtgctccccgccgcaggcggacagcagacaggcaaagaaaatcagtgcggacagcaatgcttttttcatataacagtcacctcaaagtccggtgaaggctcagaacagcttctgtttctgggcgggcttggggtcaaagggggtggtttcgtggtggcggcggacaaagaccatgcgggtgtgctcctcggtacctttgccccgggctttcggtacggtgacaaaggtgcggctgatgttgtaatacccccgcagatgctgcaccagatactgcgccacggcgggcaggcagtcggtgtcctcaatgtcctcgtaattgtagtcggtatagcggaacacggttttctcaccgtccaccagcagggtgatgctctcggcgtccagctggatctcgtccaccaccgattgtttcagcccggcggtgccgcactcggcggccagcttttccgcacgggcgcgctgatccagggggaccgactgggggtccagctgctcgctgccccgctgaccgatctccagcagaatgtcccgcatcatgcggctttcaatgagagggcggatcttctcccgcgcccgggcttcccccgttttggtgtagatcttgctgagaatccccatccgacaaacccctcctgtccggcatagcgccgggttccgcaaataaaacaaacgtccggacggcgccgcacgccatccggacttattataccatattgtaaggagcaaacaccagtccccctgtggggaggaacgcattaccgccccgcaagcaaaatggacagcaccgccttttccacgtgcaggcggttttcggcttcgtcgaaaatctcgtcggcgtgggcttccagcacttcctcggtgatctcctcgccccggtgggcgggaaggggatgctgcaccatgcagtcgggctttgccagtttcaggcgctgggcgtccacacagtagcccgcaaaatcccggcggcgacggtcggtctcccgctccatgcccatgctgatccacacatcggtgaacagcacgtcggcgtcccgggcggcctcgtcgggctcggtgaccagccggaagcggtcgccgtactgttttgccatcatcagcacgtcggcagcgggacggtagcccttggggcaggcggccaccatggtcatgcccgctttcaggcagcccacgatcaggctgttggccatgttgtagccgtcgccgatgaacccggctttcagcccttccagacggcccttgcgctcccgcaccgtcatcaggtcggccagcacctgcagggggtggccgtagtcggtcatgccggagatcaccggcacgccgctccactgggccagggcctccacctcactctgcttgtaggtgcggtagatgatggcgtcgtaatagcggcccagcacccgggcggtgtcctggatgggctcgccccgggcgatctgcagctcggtggcggcgttgaggaaggtccccagcccgcccatctggtagatgcccacctcaaagctggtgcgggtgcgggtggagttcttgccgaagatcaaagccaccgatttgcccgccaggtccttgggatcactgccttcccggtgcagccgcttgagggtgtcggccacgtccagcacgtgcaggatctcctccggggacagatcgcccagcttcaacagatgcttcatggtccatcacgctcccgtctgttcgtcggcgggcagttccgccagaacttcccccaaaatctgcagggcggcgtccacgtccgcctcggtcaggatgaggggcggcagcagacggatgcggtctttggcggtgagcaccaaaagaccgtgatgttcgcacaacgtgcggacctcggaggccttgcgcccgcccttgagggcgatgcccaccatcaggccgaggccggtgacggcctccacctcgggcagtttagccaggccctcccgcaggcgggcggcacaggcgttgacgttgtcaaagaaggcgtcgtccatccggtccacaacgacgcagccgccggcgcaggccaccgggttgccgccaaaggtggaaccgtgggagccggggcccatggtgtcagccaccttctgcttcatgagcacggcgccgatgggcaggccgccgcccaggcctttggccagggtgacgatgtcgggtttcagcccgaaatgctggcaggccaggaaagcgccggtgcggcccacgccggtctggacctcgtccacaatgaccagcacgtccttttcggcgcagaggtcggccacctgatggacgtagtcggcgtccagggccactacgccgccctcgccctggaccagctccatcatgacggcgcagacgtccccggcggccagggcctgacgcagggcgtccaggtcattggcgggaacataggcaaaattctcggggaagggtccgaaatcgtggtggaacacatcctgcccggtggcggtcagggtggccagggtgcggccgtggaaggagttgaccaggctcaccaccttgctgcggccggggccgtaggcggtgacgctgtacttgcgggcgcacttgatggcgccctcgttggcttcggcaccggaattggcaaagaaaaccttgtccagcccggtgcgcttgcacagtttgcgggccagcttggtgcaggggccggtgtgatacaggttggaaatgtgctgcagctgtcccgcctgtccggccacggcggccacccattcggggtcggcaaagcccagggcgttgacgccgatgccggaggtaaagtccagataggccttgccgtcggcatcccaggcggtcatgccgctgccccgctcgatgacgatggggctgcgggcgtaggtgtgcagcacgtattttttatcccgtttgatgatcttgtcggtgttcatggcagatacctcgcttgtatgggggaagagggcggctcagcggctgccccggcggtagaacagagtgccggaaccgcggtcggagaacatctccaacaaaaccgagtgggggacccggccgtcgatgatgaccgcctcgtggacgccctcgtaaatggcgtcggccatgccgtcgatcttggggatcatgccgccggcaatgacgcccgcggccttgtagcctgcgatttcggacagctccacctcggggatgagggtgctctcgtcgtccttgtcgtagagcaggccgacgatgtcggtcatgctcaccagcttttcggcatgcagggcgatggcaatggccgcggcggcggtgtcggcgttgatgttgtaggggatgccgttgtcgtccatgcccaccgtggcgatgacggggatgaagctgtcactgagcagatgctcgatcagggtggtgtccaccttttccacgttgcccacatagcccaggtcggtgtcgctcttgcgggagcaggtgatgaggtgtccgtccatgccgcagaggcccacgccccggcccttgagcagggccaccaggtccttgttgacctggcccgccagcacctgctggacgatggccatggtctccttgtcggtgtagcgcaggccattgacgaatttcgactccttgcccacctttttgagcatggtgttgatggcgggtccgccaccgtggaccagcaccacccgcacgcccagcagggtcagggtgaccaggtcgttcatgacggccagtttcagttcgtcgttgaccatggcgttgccgccgtacttgatgaccagcgttttgccgtggtatttctggatatacggcgttgcttccgaaaacagcagcgccatttcttcgtttttcatgggcggatgcctccgatcgaaaaagtaagggtgcgggaatccatggcgggcctttggggccggggccccgtcaggtgcggtagtcgccgttgatcttgacgtagtcgtaggtcagatcgcagccccaggccttggcttcggcgtcgccgcagccaagatccaccaggatctggatctcgtcctccttcaggaccttggcggcttcttcctcgctgtaggggtggtaggcggcgttctcgcagacaaagacctcaccggccttggagcgcagccgcacggcggtgcggtcgatggagaaatcccccggggtgtagccgatggcgcagagcacacggccccagttggcgtcggcgccgaacatggccgccttgaacagggaggagtggatgacgctcttggagacggcacgggcggtctccaggtcgggggcgtgggtgacggtgcattccagcagcttggtagcgccctcgccgtcaccggccagctcacggcagagctgctcggcaaccttggtcagggccgccacaaagacggtgtagtcctcgctgtccgcggccacgggggcgttgcccgccagccccgaagccagcagcaggacggtatcgttggtggaggtgtcgccatccaccgagatctggttgaaggtggcggggaccacttccgacagggccttctgcaaaacctcgtgggagatggcggcgtcggtggtcataaagagcagcatggtggccatgttggggtggatcatgccggaacccttggcgatggctcccagacggcagaccttgccccccagggtgaactccaccgccgcctgtttgggatgggtgtcggtggtcatgatggcggtggcggcggccagactgcccgcggggctgctgtccagcttggagacggcgtcggggacgcctgcctcaaagggctcgatgctcatggcctggccgatgacgccggtggaggagggcagcacgtccgcctccgcaatgcccagagcccgggcggtcagggcgcagacgtccttggccagctgaacgccgttcggggcgcaggtgttggcgttgccgctgttgaccacgatggcctgggcgtagccgtcggccagatgctcccggtccacggtgatgggcgcgccgtacactttgttggtggtgtagcaggcggcgccggtgcagcggacgtcggccttgatgacggccaggtccggcttggaatggttgcggcggatgccgcagtgcacacctgcggcggaaaatccctggggcgcgcagatgccgccctccacgggagtgagctgaatgttctgcatatactttctcttctctctattgaattcgccggtcacggcgttggaaggacttattccagcccggcggtctcgggcaggcccagcatcaggttcatgcactgcaccgccgcgccggaagcgcccttgcccagattgtcaaagactgccgccagcagcagttggctgccgtcgggggaggcggagcagtaaatttccagacggtcggtgccggccatctgattggcggccaggaaaccggggacctcgcccaaaggatggacggtgatctggctctggcccgcgtagtagcctgccagcgcccgggcgatctccccggcgtcggtcttgagcagttccatgtgcaggggcagcagcgactgcataccgcagtagtagtcggccaccaccggcacaaagacagggggcttggtcagaccgcacaccgcctgcatctcgggcagatgcttgtggtgcagcgtcaggccgtagctgcgggggctgtccagggccttgtcccggccctcggcctcatagtcggcgatcatgctcttgccgccgccggagtaccccgtcaggctggtcagcgagaagggatagtcggcgggcaccagccccatctggacgagaggagccaccagcaccgcaaagccggtggcgtggcagccgggcaccgccacccggttggcctccacaatgcgctcccgctggcccgccagctcgggcaggccgtagacccagcccggggcggtgcggtgggcggtggaggtatccagcacccgcacatggtcggggatgagggggacgatttcccgggatgccgcgtcgggcaggcagaggaaagtcagatcagactgggcgatgaccgccgcccgggcgtccaggcttttgcggtcggcctcggggatggtcaaaagttccagttccggccgtccggacagacggtccaggatgcgcaggccggtggtcccagcggaaccgtccacaaagattttataggttttcatgattccatgacttcctttcagagggtttccgccagcttggcccgcactttggcgatctggtccagcacgctggccttggcggggccgccgtagctggtgcggccctcgcagcaggtggtcaggtcgatggcgtggtagacgtcctgctcaaacagcgggctgtaagactggaactcctccagcgtcagctcctccagcgtcttgtcggcggcgatgcaggcggccaccatggtgccggtgcacttgtaggcatcccggaagggcatgcccttcttggtcaggtagtcggcgcagtcggtggcgttgatgaagcccttggccgccgcccggcgcatgttgtcgggcagggggcgcatggtgtccagcatgggggtcagggtccgcaggcagagggccagggtgtcggcagcgtcgaacaccgcctccttgtcctcctgcatgtccttgtcgtaggccagggggatgcccttcatcatgaccagcagggtgttcaggtcgccgtagacccggccggtcttgccccggatcagctcggtgacgtcggggtttttcttctggggcatgatggacgacccggtggtgaaggcgtcgtccagctccacgaacttgaactcccagctgcaccacaggatgatctcctccgacaggcgggagagatgcatcatgcaggtggccaccgccgagacaaactcgatgcagaaatcccggtcggacacgccgtcgatggagttggcgcagggggcggcaaagcccagctcatgggcggtgtagtcccggtcgatggggtaggtggtgccggccagggcgccggaccccagggggcattcggcgtccatgcgggcggcggcgtcctgcagccggcccagatcccgcaaaagcatccaggcgtaggccatgagctggtggccgaaggtcaccggctgggcccgctgcagatgggtgtagccgggcatgacatagccggcggcggcctcggcctggcggcagagggcctggatcaggtcccggatgcccgcctggagggcgttgctttcatcccgcatccacaggcggatgtccaacgccacctggtcgttgcggctgcggccggtgtggagccgcttgcctgcgtcgccgatgcgggcggtgagggtctgctccacaaaggtgtggacgtcctcggcggcggggtcgatctccagcgccccggagtgcaggtcggccaggatgccctggagaccctggtggatgtcctccacgtctttctgggagatgatgccctgacggcccagcatggccgaatggaccatgctgccccggatgtcctgctcgatcatgcgggcgtcaaagcggatcgaggaattgaagtcgttgacacggctgtcgaccgccttgcttgcgcggccctgccagagttgcggcatgtgaaaacccctcctgataggtcattgatgggaaatgacaaaccgcccgggggcgggcagcgccccgggacggcttgaaaattcgtacgttttaccgattatttaacttccggccacttcttcgccagtttggcgcgctcggcaatgggcaggccgaacagattgatgaagccggcggcgtcggcctggttgtagtcctcatcctcgccgaaggaagcggtctgctcatcgtagagggtgtaggggctggtgacgccggcgttgatcatgttgcccttgtacagtttcagggtgacgtcgccggtgacggtcttctgcagatcgtcggtgaaagcgcagatggcctcgcacaggggggtgaaccactggccgttgtagaccagctcgcccatcttctgggcgatgatctccttgaagtggaagctctccttgtccagggtgatggtctccaggacgttgtgagccttgtacaggatggcgccgcccggggtctcatagacgccgcggctcttcatgccgaccagacggttctcaacgatgtccagcaggccgatgccgttggcgccgcccaccttgttcaggtgctcgatcaggctgacgccgtccatctccttgccgtccacagcggtggggatgcccttctcaaagtggatggtgacgtaggtgggggtgtcgggagcctgctcggggctgacgcccagctccaggaagccgtccttgttgtacagcggctcgttcttgggatcttccaggtccaggccctcgtggctcaggtgccacaggttcttgtccttggagtagttggtctcacggttgatcttcagggggacgttgtgagcctcggcgtagtcgatctcctcgtcacggctcttgatgtcccactcacgccagggagcgatgatggccatgtcgggggccagggccttgagggtcagctcaaaacggacctggtcgttgcccttgccggtgcagccgtggcagatggcgtcggcgccttccttgatggcgatctcggccagggccttggcgatgcagggacgggcgtggctggtgcccagcaggtaatcctcatacttggcgtcggccttcaggcagggccagatgaagttttccacatattctttcttcagatccaggacgtacagcttggaagcgccggtctttttggctttctcctccaggccgtccagctcggtgccctggcccacgtcaccggagacggcgacgacttcgcagttgttatagttttccttcagccagggaatgatgatggaagtatccaggccgccggagtaggccagaactacctttttgatatcctgtttcgactttttcatgatggatccctctcccgtctatcgtttgaaatggacttgaataaatattcattgcatgtttccattataatcataccggcggaaattgcaagacggcatattatacaaacacaaacccacaaataaccggtttttatgcaccttgcggcggtgctggttcccacacgccggccaaaatggctgaaaatgcatgatatgcataaaatattcattttctatcggtaaagtgcaggttcccccgcccgcggcgggcagaaaaacgccccggcagcccggaaagggcggcccgggaccgggatgcctgcggcgggggcgcggccggggcaaaagggagcacccgcggcacagagatgccccttgcgcaaaggggccgcatcccgtatactgataaggatgggcatggcccacccagacagcggccgcaaaagcggcggaatggcggtgtatccggttatgttgaagatctatcgaaccaaggaccagcagctcacccgtgaggagcattttgaggaaggctgctggatctgtatgaccgcccccacccaggacgagatccgcaaggtggcgggttccctggacattgagcccgccgacctgcaggccgccctcgacgccgaagaatcggcccgtatctctctggaggacggctacacccttattctggtggacattcccagccaggaaaaaggctcgggggagggcgtctataccaccatccctctgggtatcctgctcacccagcagatgatcgtcaccgtctgctcggtggaaacgccggtcctggcggattttgccgcctgccgggtgcggggattttccacccgcaaaaagatgcgctttgtctaccagatcctgtaccgggcggccagcatctaccagttggaactgcgcctcatcgaccgccgccgccaggccatcgagatgaacctgtccggcaccttgcgggacaaggacctgatggaactgcaccggctggaatccaccctggtctactttgccaccagtctgcgtgccaacaacaccgtcatggaccgcctgacccggtataagcggctggaacagtaccccgacgaccgggaactgctggacgacgtcatcgtcgagctgcgccaggccattgagatgaccagcatctaccgcgacgatatcaaaggtacccgggaactgttctcggccattctggacaaccgcctgaacaacgccatgaaatacctgacctcggtcaccctcatcatggcggtgccgacggtcatctccggcctgtacggcatgaacgtcaacgccgagagcatgccctttgtctccagcggcagcgccttcggcatcgtctgcggcatcatcctgctggtgtgcgcgggagcggcctgggtgctgcacaaaaagcatatgctgtgacggcaggatttcaaaaaagcaaaaggctccgcccggcggggccttttttgtaacagcggggcaaaaatgccgtctgttacagatagaaaggaggagatggctgtggaggatcatgccatcgtcgagctgtactttgcccgggatgaaaatgccatcaccgagacggcgaaaaaattcggcgcctactgccggaccatcgcctacaacatcctggccagccgccgggatgcggaagaatgcgaaaacgacacctggcttgcggcatggaacagcatcccgcccaaccggccgggacgtcttgcgccctatctggggcggatcacccgcaacctggccctggaccgccatgaccacgacaccgcccagaaacggggcggtaccctgggcggcgttctgctggaactggacgaatgcctgcccgccgccgagacggtggccgacacggccgaagccgccgagaccgcccggcagatcagcgcctttctgcgcacgctgccggaggaaagccggggcatcttcctgcgccggtactggtactgcgacgccacggcggacattgccaaacgctatcatatcagcgacagcaaggtccgggtgacgctgcaccgggtacggggcaaactgaaacactatctggaacaggagggggtatgcctgtgaacgcacgagatttgtttgaagccatcggtatggtggatgaggacctggtggaggaggcggacggtccggtccggcgtcctgcctggacgccccgccgggtgatgggccgcgttctgcccgtggcggcctgcctttgcatcgtgggggcggcggtcctgtcctttgggcgggggatgttctccgccaaaagcagcggcggcgccatgctccagaacgaaatggcgggcggtgcggcggatgccgcccccgagaccgcgcccgataccgcccaggccccggccttctatgacacgcaggacgcggcgtcggaaaagagaaccgacggcacgggcatccccacggaactggcggaaaagatcacgccgacctccggggcggggagcggcactgccctcatggcctacgactataccgagatcgcccgggtggaccctctggacggggaacagcccgaggctctggccgtctaccggggcaccctggccgggcgctgcctgaacaccgacggcatgaccgaacggctgaccgacgccctgacggccctgggctatgatgccgccctggccgacagcgcccggctgaccaccggctatgacgaggaatccacccaggaccccgaggcggtggcccaaagcctgtatgaaaagttcggcatcggcagcgagctggactactggtcgggcattgcctggatggaggtggacctgcccgacggcggcagcctttccgtcaacaatgaactgaccctgaccgtcaccctgaccgccgaagccagtgatgccgtcaccgggaccgaggcggcccagaacgccgagaccgtgctggtggccaatgaagatttgctggacgccctgggcggctacgatgccgtgggcctgaccgggaccgactgcgcctacgacggcacccgcaacgaaccccaggcatttttctaccgcaccggggacacggcgtcccaaacgctggccgggtatgacctgggccaggcgacctttaccgccgacgcccagggcaatctgctcagccttaccctgcccggggccgccctggccgagaacgtgggcgagtacggactgatttcccgggaagaggcggcctccatgctggccgacggcagctatctcaacgccgagtacgacgaatccgcccccgccgcagcggacattgaacaggcggaaagctacctctgctatgtgagcggccgggcgctgtactatgtgcccatgtggtgctttgtcatcgatgagggccagccggacggcgcggccgatggcctgcactcctaccgggcctactacgtccccgccatccagacggataccctgctggaagccctgtccgactgatcgcccgggggcaaaacagccgaaataacacagacagccgcctgcctttggtgcatttgccaaaggcaggcggctgattttgtgtgatatgctaaggaacgggcggtcagacccggccggggccgtaggcgacccccgcccggacgatgaggtccggctcccagcgtaggccggggcggcggtccttctgggcttccaccagaaacagccagggggctttgtccggggcggtccgcaccagctgcacccgcttgggctccagcccggcggcgcacaaagcggcaaagacggccgccatttgttccggccgctgacacagggccagcttgcccccgctctgcaaaaggcgggcggcgcaggcggccacgtcggcggtggtgcacagatcatcgtggcgggcggcggcccggcgggggtctgcgctgcgaaagcccccggtaaaatagggcgggttgcaggccaccacggcatagctgtttttctcggggccggtcagggcgtagtctcgcagatcggcctgtaccggcaggatgtggccggcgtcggagccgttttccgccagggcggcggcgcacagggcgtgggcgccggggtcgatctccagcgccagacagcggccccggtgaccggcgtcgtgccaggccagggagacaatgccgcacccgctgcacaggtccacggcggggacgccgggcttcggctgcaaaaagcgggccagcagcagggcgtcggtgccgaaggtcccccccggcccggtcaggactttggtgccgtggtccagaatttcggtgtttgccataggggtcacccgttgagacaactgcccagggcagtcagggcctggcgcaggctggcggcatcgggctggccgggagcggaggacgcccccgccgtgccgaaggtggccgccgacccaaaagccccgccgcacacccttgtcaccgcccccagcggccccatggacatggtgatgaggggcgtccggggcatggcggctttggcgtcggcggtggcggccagcagctcggcggcgtcggtgacggtgcggggcatgaccgccagcttgcagatgtccgcgcccttttccctcatggccgtcagagcggcggtcatgtcggcccggggcggggtcttttcaaagtcgtgcatggaggccaccactgccagccccgcctgatgggcggcggcgcaaagatcgggcatggcatccccggcggtgtgcagctccatatcgatcaggtcggctgccccggcggcgcacagggcttgaatcaggccggcgtattccccgggggcaaaggggcgctggccgccttcggcggcggtgcgcacggtgaccagcaggggcatcccgtccggcatggcgtcccgcacttgggccatgacccggcacagggccgcagcgtcgggcaggctgccgtcctccccgcgcagggggtccaggcgcagctcggccaggtcggcggcggaatccgccagccacccggcctgggcgacggcttccgccgggtcggcggcaaagatgggcacaatgatcttgggcagccccgtcccgatggcaacgccccggacaacaacagcggacatacaaacccctcccggaaaaaatctgttatcaggatagcacagagaacggcaaaagggcaagggcgcagcccttggtacgccgcgggcagggcaaacgggcaaaaaaggccgcaggcccgggaaagtacccggcctgcggcctttcagtgcttcggaaaatgggcgggggtcaataatcgtagccgccccgcacgcggaagctgcgctcctcggggtccacggggagctcccggcaggtaaagttttcgatcatgatccaccggctggaggtgcgcaggtcgtggaccaggcgctccagggcttccggttctccctgggcttccagcaggacgctgccgtcatactcgttcatcacccagccggtcagccccagccgggaggcggtatactgcgcccggtagcggaagcctaccccctgcacccgcccgtaaaagcggtactggcggcgctccatcattccatccccgtgacggtgtagtccttgtcctccacggccttttgcagggcggcggggtccacggcgtcggcgcacagcaccacggccaccccttcctcgtggctgaccttctccacgctgacgccgggtacggcttccagcgctttcttgacggtggcttcacagtgcgggcacatcatgccggtgatatgaatggtctttctcatggcggttccctccatttcaggcgtttcagatgtttcggtttgggccggggcggactgcacggggcaggtcccggcagggcaggcggtctggacgggttcggaccgctggggcagaggcgcccggcggcggggtgcatggtcgtgggtgttgtcccggggcttgacggtgttcaggcgcagggcgttggtgaccacgcagacgctggacaggctcatggccgccgcggcgatcatgggattgagcaggatgccaaaggccgggtacagcgcgcccgcggccagggggatgcagacggcgttatagaaaaacgcccagaacaggttttcgtggatgttggtcaccacccggcgggacaggcggacggcggcggccacatcggccaggtcgctgcgcaccagcaccacgtcggcggcgtccagggccacgtcggccccggccccgatggcaatgccggtgtctgcacgggtcagggcgggggcgtcgttgatgccgtcgcccaccatggcggtgcggccggtggcctgcaggcggcggacctccgcctccttgcctgcgggcaggacgcccgcaaccaccttgtcgggggcaaggcctacctgggcggcaatgtgggcggcggccccggcgttgtcaccggtgagcagcaccacgtccatgcccagcgcccgcatctgggcgatggcgtcgcggctggtctccttgacgatgtccgccaccccgatcacaccggcggcgtggccgtccagggagaaatagaggggcgtggcgccctgggcggagagtttggctcccgcctgggccagatcgtcgggcagagcgcactgggtgcggatgaaggcctcgttgccgccggccatgaccttgccggctaccttgcccagcaggccctggccgggaacggcctcaaaatcggcggcgggacggtacttgaccccgtcggcgtcggcttttttcaggatggcacgggccaggggatgctcgctgcgggattccagccctgcggccaggcccagcaaaaacttggcaggcacgctgcgggtccccacgatctccaccacgttgggttcgccggtggtgatggtgccggtcttatccaggatgacggtgtcggtgtagccggtggtctccaggctggcggcggtcttgaacaggatgccgtttttagcgcccacgccgctgcccaccatgatggccacgggggtggccaggcccagggcgcaggggcagctgatgaccagcaccgagatggcccgggccagggcaaaggggaaggtctgcccggcgatcatccagatgacgaaggtcagcagagcgatgccgatgacggtgggaacaaaaatgccggaaactttatcggcggtcttggccaggggggccttggtggcggcggcgtcccgcaccaggcggatgacctgggacagggtggtgtcctgccccacccgggtggccttgcaggccagggcgccgttctggttgatggtggcggcgctgaccgggtcgccggggtgcttgtccacgggcaggctctcaccggtgagggcggcctcgttgatgctggagataccctccaccaccacgccgtccaccgggatgctctcgccggggcggaccaggaagatgtcccccggcttgacctccgccaccgggacggtgacgggcttgccgtcgcggacgatgcgggcggtctggggggccagacgcatcaggctcttgagagcgtcggtggtgcggcccttggagtaggcttccagcattttgcccacagtgatgagggtcagaatcatggccgccgactcaaagtagaggtcgtggcggtactgggccaccagggcggcgtcgccgtttgccagaccgatggagatcatgaccagggcgaacacgccgtaggccagcgccgcccccgcgcccagagagaccagggcgtccatgccgggggccaggtttttcagccctttgaagccgctgatgaagaaggcacggttgatccagcagacaggcagcgtcagcgccatctggaccagggcaaaccacaaggcccccgtgccgtccccttccataaaaggcggcaagggcaggccgatcatatgtcccatgctgatgtacatgagggggaccaggaagcacaggctggtgatgaggcgccggcgcaggcggggcgtctcggtatcttccagggcggcttcctccgaggcggcgtcgtcagcggcagggctggccccgtacccggcgtcggccaccgccttgcagatggcgtcggcgtcggcgggagcggcgtactccacctgcatactgttggtcagcagactgaccgtcaccgcgctgacgcccggcacggcggccactgccttttccacatgggcgctgcaggccgcgcagctcatgccggtgacatcaaatcgctgcatagcaaatacctcctttggatctgtattgattaaaacagcccttccggcagaagaatgtcgtttttggggactttgtcccaggaaaacccgtcgatcaggtcgtcggcggcgcggggggcgggggtgtcggtcaggccgcagacgtaagccagacggcccaccacttcctccggggtataccgggcgcggaggttctccaggctctggtccccgtcccgcttggacagccgccggccgtcaggggccagcagcaggggcaggtgataaaattccggggctttcaggcctaaaatctcatacagccacagctggcggggcgtgctggacaacaggtccgcgccccgcaccacctcggtcacgcccataagggcgtcgtccaccaccacggcaagctggtaggcaaagccgccgtccgctcgccgcacgatgaaatccccgcagtcggcggccagattttcctcgtaccggcccatgtggccgtcggtgaaggccaccaccttgtcggggacctgtacccgccaggccgggggacggatggcgctttttgcggcaacttcctccggggtcaggctgcggcaggtgccctggtagaccacctgcccgtcgctgcggtggggagcactggcggcatggagctggctgcgggtgcagaagcagggataggtcaggcccatggctgccagcttgtcataataatattggtaaaggtttgaccgctcgctctggtagtagggggcgtgggggccgcccttgctgccgccctcgtcggcggaaagccccagccaggccaggtcctcctccagcaggtcggcaaagctgcgggggcagcgcatggcgtccaggtcctccacccgcaataccacgctgccgcccttgcttttggcggacagccaggccagcaggcagcagcacaggttgcccaggtgcatccgtccgctgggactgggggcgtaacgccccaccacggtgctcattcggtgcgggccgtctgctccagcatgcagcggccgtcgcccatggtgcggatgtgggcgcggtagaaggccgccaccgccttgcgcatggcgtcggcgtcggcacaggctgccgtctccaccgccgagtgcatggccagctggggcaggccgatgtccgccgtgggcaccggcaccgtgttggcctgcagattgcccagggtgctgccgccgggaacgtccgcccggttggcaaagcgctggacggggacccccgccatgcggcagatctccccgaacaccgcgccggagtaggcggtggtggagtatttctgggtagcgttatatttcagcactacgccgccgcccagacggatggggctggcggggtcggatttttcggggaagttgggatgggtggcgtgggcgttgtccgccgacaggcagaagctgttggccagcgcccgggccatgccctgaccgctgtgggggatgacgtccaggatgcggtccagcaggtcccgcaaaaaggtgctctgggcgccctgacgggtggaactgcccacctcctcgttgtccagcatggcccacaggggcgcacacgcgctgtcacagtcggcgtcggcgtccagaaatcccagcagggtggcggcggcgcagcccaggtcgtcgatgcggggggagagatagtattccccgtcggggccggtgcgcaccggctcctgcagggtggtgagcagcagctcgctgtccaccatgtcctcctccgggatgcccagggcctccgccaccagggccgacaggctgcggcagccctcggggccgtagaggggctgcatatccacctgggcgttgtaggtgtggccgctgttgcagctgcggtcaaagtggatgcacagggaggggatcgccgccacggggcggtcgatgttgaccaggcgggtgtccaggccgtcctcggtacgcaccagcacccggcctgccacgcccagaggacggtccagccaggtgggcatgatcatgccgccgtagccttccaccggaaggcgctcacacccggcggcggaggacttggcgggcttgatgcgccagcccggcgtgtccgagtgggacagagccatccgccaaccgccgatggcgtgttccggcacccgccacgccgcgatggaggagccgttgcgggtgacgtaataccggccgccgggggccaggttccagtaatcggattcttccagccgggtgtagccggcggcttccagccaggcggcggcttcggccaccgcgtgccagggggtcacgcccgcccgcagaaaggcgaacagacggtcaagggtctttgtatcctgcatggtgaagcaaaccttctttccaatgattgaccggggcggggcggcggggcgtctgcccggcggccgcccggttcccgggggaatatcgacagttcctattgtacccgaatccgcgtcccggggcaaccgtggcccggcggggcaaaaccggcccgcccggcggcaaaagggcgatgccacggcaaaagccggggccgtgcccggcaaagcccggcatgaaaaatttgcggcggattttttggcaaagctgccgcgggaggacttgcacccggggcatgaatctactatattgaatacaggtcattttgacaagtacgcactttttggataccgctatcctgcggggaagggagcagaccatgagaccgaatcccgattgtgactgccgctatgccgatgtgggctgcgaccggatggaatgtgtgatggacaagatcagcggcaagtggaagatgcgcattctgttcatggtgggtgcccacggcaccctgcgctacggggagctgcggcggcttttgggggatgtgacccacaagatgctcagcgcccagctcaaggaactggccgccgacgggctgatcgcccggcatgattacgccgaggtcccgccccgggtggattacagcctgaccgagcacggggaagccctgatgccggtgtttgacgccatccagaactatatccgccgctacggctgcggccgtgacgaggcctcctgccctgataccgatttgtaaccgcccggccatgtatggcgcggggctgttcgggcgaatactatgagggaaaacaccagaaaggaagatccgatatgcgtatctgtaaattggcggcgctgcttgcggcggccgcgctgagtgtgggaatgctgacggcatgcagcaaaagcgatgcctcgtccatgatgccttcccccacccctatgtcccaggccaccgatgaggccgccgatacccccgagaccgcaccggccaccgccaccccggaacaggccgacatgggctataccgaggcggggctgacccgcgtgctgggcggctttgtgacctatgaggccgggtccgcggggggcagcctgaaagcggccattgcggcggcggacgtggtgcgctacaccgcccagtacggcaagggccatgaggaggagatccgcaccgacgccatgaactggaaaaacggcctggacgccgaccagcaggcgctgctggaagaaaactggccggacatctgctacaccgccaaaagcatcaccgaggaccccgaaaagaccaaggggatgctagccgacgccggcgtgatggaggatttctccggcgtggatctggagacggcagcctcctgtgtggatgtgctggatgaagttctgggcaaggcagagtgacccacaagcggcaaggcgaatgcaaaaaacgggttcccccggaaaggggaacccgttttttgtgtaagcgcgagattgcgggaatggtaagatcagttggcctcggtctcggaggggtccagcttgccgcgcttctcccatacgctgtacaggatgaagcagaccacgaaggagacgaccatggcgatgacggtgccgatgcaggcgttgaagaagttggtcatgctgtcgccgccgatgtaagcgggcaggaccagcagtccgggagagccggaagcgtaacggccgacaccggtgatgcccaggtacaggccgcccacgccgccgcccaccatggcagcgatgagggggtagatgaacttcaggttgacgccatacaggacaggctcggtgatgcccagcacgccggtcagaccggcggaagcagccagctgcttggtggtcttgttgcgggaacggatggcaacggcaaagccggcagcgccctgagccacgttggaggtcagcatgccggggccgacgacggtgtcaaagcccatggtagcaaggttgttggtgccgatggggatcaggccgtagtgggtaccggtcatgaccagcagcgggttgaagataccgacgagcgtcgggaccagccagccggcggtagcggtcagccaggtgaagaaggcagcgatcaggtcgccgacccaggtgccgatggggcccaggacgatgacggtgacggtaccggccaccaggatgctggccagaggcaccgagaagaacttgatggcctggggagagatcttctggacgaagtgctccacgatggacatgaaccagacgcccagcaggatgggtaccacggaggagctgtaactggcctgggtgacaggcaggccgaagagggagacggcttcctcaccgctcatcagggtgatgaaggcggggtagaccaggatgccgcccagagccatggcaacatactggttgcacttgaagctctttgctgcggaagcgcccagcaggatgggcaggaagtagaaggcggagtccgcaaaggcgttgaggatggtgtacgtctgggtggagttgtccagccagcccagggtgacgaacagggccatgaaggccttgagcagaccggcgccggtgatggcggggatgatgggctggaagatgcccgcgatggccgccagcaccttgctcagggcagagcggttgtcctccttggcggccttggggtcctccacgggagcggcggactcgaaaccgcacagggcgatgatttcctgatagacggcgggaacgtcaggtccgatgaccacctggtactggccgcccgcattgatgacagccataacgcccttggtctttttcagctcgtcggtctgggccttgctctcatccttgagggtaaagcgcagacgggtggcacagtggaccaccttgtccacgttttccttgccgcccacgttggcaaggatggtggatgccagttgtttgaaatccatagaaatcctcctttttatgccagtcggcggaccggtcagcccagatcctcgccgttggtctcaatgactttcttgtaccagtagtagctgtcctttttgctgcgggccagggtgccggtaccgtcgttctgcttgtccacgtagatcatgccgtagcgctttttcatctcgccggtggacgcgctgaccagatcgatgcagccccagcaggtgtagcccagcagggggatgccgtccaggttcaccgcctccagcatggcctggatgtgcgcccgcatgtagtcgatgcggtagggatcgtggatggagccgtccgcttccaccgtgtccgccgcgcccaggccgttctccacaatgaacagcggcttgccgtagcggtcgtacagggtgttcagggtcaggcgcaggccctggggatcgatctgccagccccagtcgctggacttgaggtaggggttgaccaccgccttgatgacggcgttgccccgggctttctgcttgagcacctcggggtcggcggagatgcagcggctggaatagtagctgaagctgacgaaatccaccgtgcccttggccagcacgtcctcgtcctcggggcgggtgtccagcaccacgcccgcctgctccatccgctttttggcccacaccgggtaggcgccccggacctgcacgtcgatgaagaagtagttgtcccggtcgcactccatggccttgtaaacgtcggcgggagcgcaggtgtaggggtaatactgaccggcggccagcatgcagcccaccatgcagccgggcatcagttcatgggccagctgcacggccttggcgctggcgagcagctcatggtgcgccgcctggtactggacctgctccaccttttcccccggctcaaagaccaggcccgcccccatgaagggcatgtgcaaaagcatgttgatctcgttgaaggtcagccagtacttgaccaggcccccgaaattctcgaacagcacgcggcagtatttcaggaaggcgtcgatcatgcggcggtctttccagccgccgtattttttgatgagggcaatgggagtgtcaaagtggcagatggtcaccagcggctcgatgccgtacttgcggcactcctcgaacaggctgcggtagaaggcgatgcccgccgcgttgggggtgtcgtcgtcgccgttggggaggatgcgggtccaggcgatggacaggcggtagcacttgaagcccatgcccgccatcagggcgatgtcctccttgtaatggtggtacatgtcgatggcttcgtgagcggggtagatgtggtcggcgtcgcactccagcatcttcatctcgccccgggcgaccttcatgcggtcaggcccgaaaggcaccacgtccacgctggacaggccccggccgtccacgttgtaggcaccctcacactggttggcggcagtggcgccgccccacagaaatccttccggcattctcatggatgtccctcactttcggtcgttttttctgttgccccggtctgtgacaacttacagcttttatagaataaaatacgttggtaaaaaagaaaaggtgtccgggccaaatgggaaccggcatttcaaaaaactgcccgccggccctgcggtctgaaacaaaacgttcagccagacaaaaataaagctccgtttttgtctaccttgcacaaaggaacccgggccgtttgacggcgtctcggaaggcaggatataataggtatcatattacaggcaggcacgcgggcctgctttttgcaaaatcaggaaagggaatacaaatcatggatctgaactgccgcatccagcgccacaccggcctgacccagaccgagcggcatctgcgggactacattctgcgctaccccgaaaaggtggcccagatgaacgcccgggagctggcccaggccagctttaccagcccgtcggcggtgatccgcttctgccagaaattcggctacaaggggctcaaggacttcaaggccgatctgctgtgcgcgcccggcgggcagggggagggggaaacgcccgactgcaacttccccttcggggcagacactccctttgaccaggtcaccgacgcggtgctcaaggtggaacgggaaagcctgcgccttctgtgcaccaccctggacgggcaggaagtacgacgcgccgtggacatgctgctgaaagcgagctgcatcgacctgtgcgccatcggcaccagcggctatgtgagtgctgattttgccttccgcatgatgaaattcggccaccggatcaacattgtctccgaccgcatggagctgagctacgccatccagcagatggacaaaaaccattgcctactggtcgtttcctactccggcgccaatgagcaggtgcgcatttccctgcgggccgcccgggagcacagcgtgccggtcattgcggtgactgcccggccggacagcattgccggcatgcaggccgactgtgtgctggccctgccgcctttggaggcaaacgacgaaaagatctccacctttgcctccgccgtggcggaaaaggcggtgctggatgtgctgttcgcccatattttccagcagaactacgaccgaaacacagattttgtgcgcagcgacgcccggcgtttgcaggacgtgcgggtgaaaccctgaaaaattgaatcacacaatgcccgggatgccgtgtcggaatacggcgtcccgggcattttttacattttgccaaaggcgaaaatccttgatttttgacggtgccggtgttaccatataacataaattatgatgtaatcatgcgccaaaacggagttgacaagaaaaagtacggtttatccggaaatgggttgcaactgcctgccaaggaacatgagatagatcatggtaaaccgttaaggaggaatcaggatgaaagtgaattttcgtcggctggtgagcgtgttctgctcgctggccatgtgcgcggccctgctgccggcggctgtcctggcagatgacccggcagttgcgcagatgggcgacactacctatcccacgctgcaggcagcggtggatgcggccggaactgacgccgcgaccatcaccctgctggacaacaccgccgagaccgtcaccgttggggcgggcaagaacatcacgctggatctgaacggcaagaccgtgaccggccaggccaatgcggctgtactggtggacggcggcagcctgacggtccaggacagcaccgtcaccgcggaacccgttgtgggcgatgactacacggtcacctacacttccggtgtgctggaagccggtgcaggcaagcacgcggtgcaggtctataacggcggcagctttgttctgcagagcggcaccgtcagctccaccggcaactgcggcatttatgccggcgccaccggcagcggcaacggcaccgctaccgtcaacggcggctatgtccatgcccgcgagtacggtgtgggcgccatgaatgaaggcacgaccctgaatatcaacggcggcgtcatcgttgccgatgacaatgcggcggtggccggcaacggcaccaccggtctgggcggcaccaccatcaacatcgccggcggcaccatgatcagcaagctgatcaccagcggctacatcacctgcggtgtctaccatccccagtccggaaccctcaacatcaccggcggcaccatcgtgtccaccaacggcgtgggcgttctgatgcgcggcggcagcgccagcatcaccggcggcaccatcattgcccgcggcaccggcgagggcaaggtcggcgacagcaccgttctgagcggccattacggtgttctgtacgatacccagagcggttatcccggcctgggcaccgacagcgctgtttccgtcagcggcagcgcttccgtctccgcggatgacgcctgcatcgccgtccgcaccaatgttgccgagggcgaaaacgaccgtgtcgtcgtcagcggcggcactttcagcaaggacgtcagcgacttcgttatcgacggcaacaagaccgtgcaggatgaaaacggcaactgggtcctggctcccgatgagaccgaggccgttgcggtttacaacggcaagggctacatgagcctccagtctgccatcgacgtggcgggcaacggtcctgccactgtcagcctggtgggcaacaccaccgaggccgtcaccatccctgccggcgccgacatcaccattgacattgccaaggatgtcaccctgaccggcacttccggcgaccatgtcatcaccaacaacggtaccctgaccgtgaccggtgaaggcaccgtcaaggccatggcatccaacaaggcagcggtggagaacttcggcaccgccaacctcaagggcgcgaacttcacccgcgaagtatatacgaccggcggcaactggtacgtgctggacaaccagggtaccatgaacatttccgataccgccaatgtctttgccgaggctcccaatgcctctctgatccgcaacctgggcaagagcctggagcagaaggctaccctcaacatttccggcggcaccatcacccagaacgcgttcatcgccgtcaagaacgacgactacggcgcactgaacatcaccggcggcaccatcaattccaccgcgcaggcggtccagagctggcaccaggccaccatcaccggcggcaccatcaacggcccggtcatctcctgggcgtacagctccatgcctgccatggaaagcaccctggaactctccggcaccgctgtggtgaacggcgatgtcatgtccgtcacctatgacagcgtggccgtgccccatgtcaccatcaccggcggcaccgtgaacggcaagctgatcaagggcaagcccctttccagcggcggcgttcaggccctgcccaacgattccgatatggcggacatcgttgtctccggcggcaccttcaacaacgcggtccccgaggagttctgcgccgaaaacttccatcccaaccggaatcccgacggcagctactcggtccacgtccatcagttcggaccctgggtgaccaccgtccagcccggccacaccacttccggcactgaggtccagacctgcacggtctgcggctatgagatcgcccgcaccattgcgcctacgggcaacaacgaccatcccgacatcgagcaggccaagcaggacggcacctggggtcaggcaactgccactcccgcgcccaccgctaccgctgcgcccgcatccggcagcgtgaacaccgttccccagaccggcgacgagatgccgctggctgtgctgggcggcgctgccgctctggccgccgctgccatggtcgtcctgatcctgcgcaagcgccgggttttctaaaaatttgactgcggaactttccgtggaagacgaaggggtcgtcccgtcaggggacggccccttttgttgtgccccgccgcttgcacccttcgccccgccctgtttataataggaaaagaacagacaaggaggcgcagcggatgcgggtgatctttctggacgtggacggtgttctctgcacgccgctgagcgtgaccctcagcaatctgctgcgcctgcccatggaccgccaactgtttgacccaatcgctcttttctggctgtgccgcctggtgaaaacgaccggggcagcggtggtgctgtcctcctcctggcgggaggaactctacctggacgagcctttctgccgggcggtcattgacaacctgtaccgcaccctggcccggaaccgcacccccatcgccgacgccacgccccttttggagcagggcggcaagggggcggagatcgccgcctggctggaatgccatccctgccagagctacgctgtgctggatgaccgggactgctttgcggcggccccggcggtggccgagcactgggtgcaggtcccggcggagcggggactgcgttataaagaatatcttgccgcgcggcagctgctgcgctgaatttgttgtgtgagggaggggaccataccctatgccgcagatcatggaactgaccgatttttccgcccccgagctggacgtctttgcccggctcaccgacacccgcctgcgcaatcaggcggagccggaaaagggcatttttattgccgaaagccccaaggtcatcaccacggcgctggatgccgggtatgagcccatctcctttctcatggagcaccgccacattgaaggggacgccgcgcccctgctggcccgctgcccggatgtgacggtatataccggcagccgggacctgctgcgccagctcaccggctttgccctgacccggggcgtgctgtgcgccatgcgccgccccgccctgcccgacgtggagaccgtctgcgccggggccaggcgcattgccgtgctggagggcgtggtggactccaccaacgtgggggccatctttcggtccgccgcggccctgggcatcgacggggtgctgctcacccccacctgctgcgaccccctctgccgccgggccgtccgggtgagcatgggcaccgtctttcagatgccctggacctacatcggggacgctccctcccagtggccccaccccggcctggaccggctgaaagccatgggctttgccacggcggccatggccctgaccgatgactcggtgagcctgcgggacccggctttggcggcggaggaaaagctggccatcgtgctgggcaccgagggcgacggcctggccccccgcaccgtggcggggtgtgactacaccgtgcgcatccctatggcccacggagtggattccctcaacgtggcggcggccggggcggtggccttctggcagctggccgcgccccagtaagcccgggaggcggaacatcatgctcatccaggaacagctcaaacaacaggcgggtttctccgacgtggagcgcagcatcgccgatttcattctggcccagggggcggggctcaagcagctcagcgcccggcagatcgcggcggaggcctacgtgtccccctcgtcggtggtgcgcctgtgccagaaactgggctacgacggctacaacgcctttcaggatgcctggctggcggaacaggaatacctgtccagccggttccaggacctggacgccaaccatccctttgaccccggcgagcccatcaccgtcattgcccgcaagctgggcgctctgtaccgggagaccatcgacgacaccctggccctgctggaccccgacgccctggtcaaggcggtgggatactgccgccgcgcccggaacatttatatctgctcaggcggcgcccagagcgccctggccgagtcctttgccgaaaaaatggccaagatcggcaagccggtggtgctgtcccagcggggggacgtcatgtacttccacgcctgcaactgcgatttgaaggactgctttatcgtgctgtcttactcgggggagacgccccagaccctgcgggtggcccgcaagctgaaacagcgccgggtcaacaccattgcggtgacctcctacggcagcaataccctggcgtcgctgttcgactgcgtgctctgcgtctccacccgggaacggctggtccgcaatctgggcagtttcagcgctcacctcaccgctttgttcgtgctggatgtgctgtatgccggggtgctcagccagaactacgatcaggtggccgacgaccgggtgaaaaacgtccgggattttgagatctaccgtcacagtgacaaccccctgctgcgggaggaatgaccccgcggcaagccatatgcaaaaaggccgggcgtgcccccgcaacgggaaggcgtgcccggcccttttttgccctttggcagattgcaccatcccgccccgcaaaattttgacagcctgccatgggttttggcagagtgtttcacaaaaactgcccttttttctgcgattgttgcaacactgttgaaacacatccccgaattcttgtcttttggacgccccgggactagactgaaatcaccaaaacaaatcgatttgcagcgaaaaaatcccgcgacggcgggagacgggtgcggaacaggtgttccaaatactgtgaaacagaaaaggagaaaatcatggactatgccaagctggccgccgaggtcatccgactggttggcggaaaagaaaacatcaccgatgtgggtcactgcgcaacgcggctgcgcttctgcctgaaggatgcaggcctggccaagaccgacgaactgaaagccacggccggggtcatcggcgtggtgaacaagggcgggcagtatcaggtcatcatcggcaacgaggtcaacgaagtctacgccgaagtcaccgcccagctgggcgtggcccccacccccgaggaagccgactgcggcgattgcagcgacgaacccgaggaaaagaaaggccccgtggccaaggtgctggacatcattgcgggcagctttttccccatcatccccgctctggttggcgccggtatggtcaaggcgctgctgtctttgctggtagctttcaaactggtggattcctccaccgagacctaccagatcatcaacctcatcgccgacgcgggctactacttcatgccggtgctgctggcggtgtcctccgcccgcaagttccgcgtcaatgaatatctggccgctaccctgggctgcatcttcgtcagcccttccctggtgtccctcttctccgcggccagcgaagccggcaccacggtgcatttcttcggcatcccggtcacccaggccacctactccaactcggtggtgcccatcctgctcaccatctggctcatgagctatgtggaacccttcttcaaccgggtcatccccaaggcggtgcgcaccatctttgcccccatgttcaccctgctcatcgtggcacccatcggtcttatcgttcttggccccatcggcacctgggtgggtgacctcatcggcgcctttgtcgccctgctcaataactacgccagctggctggttcccactctggtgggcgcgttcaccccgctcatggtcatgtgcggcatgcactacggcctgatccccgttggcattaatatgctggccaccaccggcaccgacatcgtcgccggccccggcatgctggtctccaatatcgcccagggcggtgcgtccctggccgtggccgtccgcgccaaaaaggaaaacatcaagtccctggccacctcctgcggtatctccgcggtctgcggcatcaccgaacccgccatgtacggcatcagcctgcgcttcaagcggcctttgatcgctgccatgatcggcggcgcggtgggcggattcttcatgggcatcttccaggtctgccgctttgcccaggtggcgcccagcatcttcgccctgcccagctacatcggccccgacggcctgcgcaacatgtacctggcggcggtgggctgcctgatctccttcgtcatctccttcgccgcgtcctatgtcctgggcgtggatgaaaacaagtgatcctttgactgaataaggaggccgttatgccttttcccaaagatttcctctggggcggcgccaccgccgccaaccagatcgagggcggctaccgcgaaggcggcaagggcctgagcaccgccgacgtcatgacggtgggcggcaagggggtcaagcgccgcaagaccatccccctggagccggatacctactatcccagccatgtggccatcgaccactaccaccattaccacgaggacattgaactctttgcgggcatgggctggaactgctaccggctgtccatcagctggccccgaatcttccccaatggggacgaggcgcagcctaacccggagggcctggccttctatgacgccctcatcgacgatgtcatcgcccacggcatgcagccgctggtcaccatctcccatttcgagacccccctggccctgcaacagtacggattctgggaaaaccgcaagctggtggacttctacacccgctatgcggaggtgctcttccgccacttcaaaggccgggtccggctgtggctgaccttcaacgagatcaactgcatgtccacccagccctgggtcagcgcgggcatcgactcggaggacgagcaggtccgcatgacggcggcctaccaccagtttctggccagcgccagggccgtccgcctggcccatgccatcgaccccgaaaaccgggtgggcatgatgtacgcggggcatttcgcctaccccaacagctgcgaccccgacgacgtcatcggcaccatggacttcatgcacaagatgatgttctactgcgacgtgcagtgccggggctactatcccgcctacaaactgcgggaactggagcgccagggtatcaccctgcccgtccagcccggtgacgacgagatcctgcgcagcggcacggtggactttgtgtcttacagctactacctgacccacgtcaccggcaaaaagaccaggggcatcctaaaggggctcaacggtctggacaccggctataaaaacccctacatccccaaaagcgactggggctggggcatcgacccccaggggctgcgctattccctcaattatctctacgaccggtatcagctgcccgtcatggtggtggaaaacggcctgggagcccaggacaccgtggagccggacggttccatccacgacccctaccgcatcgactacctccgcgcccacatcgccgagatgaaaaaggcggtggagctggacggcgtccccgtcatgggctacactgcctgggggcccatcgacctcatcgccctgagcaccggccagatgagcaagcgctacggcttcatctacgtggacctggacgaaaacggcgcaggaacgatggaacgccgcaaaaaggacagctattactggtacaaaaaggtcattgccaccaacggcgaggacctggactgaatcggaaaggagaaccttgaccatgttcgtttatctgcccagctgcaactttaccgccacctgtccccaggcgagcaaatggatgaaggagtatctggcccaaaagccggacgtgaaggtggcgggctgctgccgccccacccaaaagatcctcaccgccgatgacacggtgctgtccatctgcctgacctgctcggccatcactcatgaagtctccccccaggccggggaggaaagcctgtgggagtacctgctcaccgacgacagcttcccctggccggactaccacggggaggagatggtcattcaggactgctggcgcgcccgcaacaagcctgccatgcaaaaggccgtgcgggagtgcatgaagcggatgaacatcgtcccggtggagctggaggaaaactttgaaaagacccgctttgacggtgtctggctgtacaacccggtggtccagaaaaacctggacatcgcccccgagtacttcacccacatccgggacaacgacgtggagcttcttcccccggaagagcagaaagcccgcatggtggagtgggccaagcagtacggtgaccgccgtgtggtgacctactgcaccgcctgcctgaaaggcaccctgatgggcggggccaggggcgtccacctgatgcagctcatcacagagagcctgtaaaacaaaataaaaacacccgccccgtccggctgtccataccggaggggcgggtgcttttttgtgtctgcgggaatggcgggaaaagaacgatcagacggcggctttctcccgctccatggccgaaagctccggcatgacggtcaggcgcatggtgatgtagcaggccaggccgccgatgacattggagatgggctccgccagaaagacgccgttgacccccagccccgccacatggggcaggatcagggtcaggggcaccacgatgatggccttgcgcagcagggaaaagaagatggccatttttgccttgcccagggacttgaacacgctctgcccggtgaactggaaggccatcatcacaaaaccgaagaagtagatgtgcagcgaaggcaccgccgcctccaccagcgccgggtcctggttgaaaatgcggatgaacagggtgggaaaggcggagatcagcccccagatgagcagggtgtagccaaagcccagctgggtcatgaagcggatggcctgccgcacccggggaacgctgcgggcgccgtagttgtagctgatgacgggggaggtgccgtcggtcagggccatgacgggggtctgggcgatctgccgcaccgagttgatgacggtcatgacgctgacgtaaatgtccccgccgaaggtctgcagcgtggaattgcaggccatctggaccaggctgtcggtgaaggacatgacaaagctggaagtgcccagggccgcaatgcgcccgatgcaggcaaagtcagggcgaaagcctttccattccagtttcagctccgcctttggcccggtcaggaaccgcagcacccagatggcggacaggcactgggacagcacggtggcaatggccgcgccccgaacccccagcccgaacacgaaaatgaacagggggtccagcacaatgttggccgccgcgcccagcaataccgtcagcatgccggtcttggcaaagccctggctgttgatgtaggggttgagacccagggaagtcatgacaaagaccgttcccaaaagatagaggatgaggtagtccgaggcgtaggagtaggtatcggcgctggcacccagcaggtataggatggggcggtgaaaggcgatactcagcaccgtcaggcccacgccgcagatcagcagcatgaagtaggcgtttgccatgatcctgcgggcctgggcaaaatctttctgcccccgggcgatggagcacagcggcgcgccgcccacgccgaacaggttggcaaaggccgtgaccagcgtcacgatgggaaagcagacccccagcccggccagggccagagcgccctcccccgggagcttgccgatatagatgcggtccacgatgttgtacaacaggttcagcacctgggcgacaagcatgggggcggcgacggcaagaacgttctgccggatgctgccggtggaaaaatccacctgctggccatggttcgcgggccgggtgctgtgtgactgcatatgggacggcatctccttactttttgaaagatttttggcaaagttctttttttattatagcacggttttggatatgcggtaacagtttttctgtgcccgcaccgtgtagacaaaaaatgcccgcccggcacacgtgaaccgaatgcgggcgggacggtaaggggagataaaagcaaacgagcgggcggaaggaaaccggttattcgtcgtcctcgtcatcttccaggaccagggtattcatcaaaaccatatcctgacgggcaaggtcgatcatttcctgcaggctttcggcggtgacttcctcctccatctgcagctgcaggatcagcgaaaggttcagccccgataccagaaaggtgttgggccgggcgatcagtgggaacaccgtctggttggcgctgccgcttttcaggtcggagcagatgaccacctgttcatcgccccactggtccagatatttctgagcggcagccagcaggtcggcggtgccgttttccagcgtgacacaggcggaatagacgttttccgcgccgaaaaagttctgcatggtgctgcacagccccgcggcaaaatctccgtggctcacaagtaaaagcttcatagtctgttcctttcgtcgtcacaatgtttcctggcagctccagcggcccaggatctcccacatctgcttgcgcatgccgtcggagaatccgttgagcgaaccgtgcagcgaaagccggcgcagataccagccggtcagataatgttcaaagcccttggagatggaaatcaccgagcagcggtgtttgtccaccgcgccgtaatattcgctgtacagttcaaaaggttcaaaaatcatggaatattccggcgagaagatcaggtgtgccagatgatagcgctccaccgtttcaaaggggcgcagttcccgcttgcgggtgggcggcaggccgtccgcaagccgctgaagcaccgcccgttcctcctcgttgggaacttcgggaatatccagacgggaggcctccacagggaccagttccttggcaaaggaggtttcctcgtaccggaactgcaccggacgcaggtcggcggcggtctgacggcacagctggcggtcgaactcctgtctcagaagttcggccaggcgcagcatctcctcatagtcccgctttttgcgcacaaaatgcgggctgttgtccccggcaggccccagcaggaaggtaaagaactccccgggatactgccggcgcagctgctcaatgcagtaaccgggatactccgccgtaaagtcccccacaaacagctccttggtggtggggtgcacgttgtggatcaggaaagtcaccacccgtttcccgtcgccgtacagggacagcgtctcggcgtagacatggggcgtggcatagttcatcacccggcttttgcccaccttgtcgaaatattcatactgatagatgtattccaccctgtcatagctgtgcatctcgatggtggtcacgcctttgcggatgatgtccaccacgtaatccacatatgcgtcatcggtggtcatacaggggcagttgtgggagtgggtggcagagcagatgcagtggatcttctcgccggtcgcttcctcgatggcccgggtgatgcggtcctcccggtccttccacagctccaccgtatcgatggacacatgataaaaaggcaggtcatcctccgggcgaaggacgatgatgcggcagtgcaggtgatccgatactgcctggtgctgttcccggctgagcatccggttgaccggaaagaccgggtcgatgcaaaactgtttgcagccgatctgcatgacggcaggcctcctttcagcggcggtaaggtgttttgcggaacacattgttcagattgtatttgaccgatgtgccctggtgaatgttcatggcatactgggtctgctctttgccatcccgcacaatggtcttgacggaatcggcgttttccgggtctttcatgatgcggtcgagggcatccagctcgtagcgcagcagcgtgctggtgacatccagcatgccgtggcccgggaacatggcctcgatctcgtccaggcgggcgaccaccgcctgcatatccttccacagcgtttcaacggtgcagttgtcggcacaggggtcaccctcatactgtcggcccgcgccgccaatgtcgccggtaaagataatgtggttgtgcaggtccaggtaggcgcactgtcccgccgaatgtccccgcagagggatggcctccacctcatacccgccgcccaggtcaaaccggtagccggtggggatggggaccagctcatagtcccggtacgggatgatgtcagcgcggtcgaactcggtataaatgtttttgccgttttcgtcaaacaggtagtcccagatatggggattcatggtgcggcgcatggaaaattcctcgtcctgatggcagaagcaccggtcaaactgggcattgccgtaggcgtggtcataatggtgatgggtgttggccaccaggatctccttgtccgcgccgatcaggtgctgtaccaggcctttcaggtctcccacaccgaaaccggtatcgatgagcagggccttttccggaccgtcgatcaggtacatccacagatcgccggcgccgtccatggactcctggaacaaagcccagacgttgggacgcattttgtaggcctccacataggggttgatgtcaggataaaattccttgagggtgctgtactcccgcaggatcttcatgtagggccagcggatgggacgttcctcctcccagcggatgcggtgggatttcagattggatttgatatagcggttgggggtataagatccaccaggcatagaaaaacctcctgtcatgaccggcaaatgccggtgaaaaaagtacaaaacggaattacagccccagcagcggcggcaattcccggatatcggccaggacaacgtcggcggcgctctggtcgatgaggccgtcccggtcccgcagggcagccacatagcaccctgccgccttgcctgcacggatgcccacggcggaatcctccaccacgacacaccgggaggcgggcaggtccagctgcttcatcgcctccagataaatgtgcgggtcgggcttggccaggggggaatcccacccggacacgatcccggcaaaggcttcccggatgccgcattccctcagcgcggcatcgatgacctcttcccgggagttggaaaccacggccaggcgcagcccgccttccctcaggcgggccagcgccggaacaaggccgggcgtcaggatgtccgggtaacggaattccatgacgcgatgggcaaggaccgcgtcacggttttgacggtaaaggggctggctgccgaagatcgcgtccatctgcacggtgcggtcggtcatattggagccgcccaccatgcggtagagcgcccggcggtccacctgcaggcccagttctttcaggaaggcttcccgccggtccatgcgaaagacctcggtctggcagatgacgccgtcaaagtcgaacagcactgcccggatattgcgatgatccataggtacggcctccgtgggatgttcagccgtcatcggtaagcaggcggcgggtcttccaccggccgctcagataataggccacgcagatgcagcccggcagaatgcgggagcaggcaacgccccaccacagtccgatgtagcccagatcgaacacatacatgaacagcatgctgaacccgatcttgcagaccagcccgtccagaagtcccaggacaaatcccagttccacaaatccgcagccggtgaccatggcctggaaggaccctgtcagggccgatgcgaagaaatgcaggacaaagatacgcaggaaggtggcgcccagagagatcacagcctcgtcggcggtgaacagacggaagatctggtgcgggatcagcaggcacaaagccgcggaaaccatggcgcagacggtagccgccacataggtacacagggtggtgcgcccggcgcgttggatcttcttggcgcccaggttttgcccgaccatggaggcggatgccgtgtcgatgccctggacaaacacttccaggaatttctgcagtttgttgcccacgctgttggtggcggagaccaccaggccgaaggagttggcgctggcattgacccaaagcattcccacgcggacaaacatgctgcgtaccacctggggaatacccaggcggatcagcacccacagaatatcccggtccatcttgaaataggccagagaaaattcaaaatcaaatcggtcccggtttttccacagaaagaaaaatgcggccaggaaagaacccagctgagaaaccgcggtggcaatggcagtgcctgcggcatccagccggaacacagcaaccaaaagaatatcaaggacgatattgatggcggctgccagcagaataaagatcagcgggcgtttggattcccccatgccgcgcagcacgccgcagactgcattgtacccgaagatgaagggatatcccagggctgtgatgatcatgtaggacgcggcttcaccgaaggcttctcccggacagttgagcagcgtcaggatagggcggcagaacacaacgaccaccgcggtaagaacaaaggaaagcagaagcgtaaaggtaagcagagtgccgatggtccgcttgatgcggcgctcattgccggcgcctgcaagttgtgcaatgaagatctgtccggcggtggcaaaaccgatggcaatggggctgacaaggtcggccagttcgccgccggtattgacgcccaccgtgccgatgctgcccacatactggccgatgacgatcaggtccaccatggaatacagctgctgcaccagattggtcagcacgatgggaaaggcaaagataatcagggttttcatgatggggccggtggtcaggttggtgcccacccggccggtggctgcggcctctggcatgggatgatcctcctgtctgtcgaaagattggaatccaaaacagccgggacgctctgaaaagaataccgtttacgcggcgtgctcaagggcacgtttggcctcatcacaggcgggctgtttgatggaaaagcggtcgatcacaatgacaaatccgtccgccaggcgcagctgcgcagtgctttttcctacggagaccaacaccccgtacagacccgactgggtcagcacggcatctcccggacgcagggattcctgcaattccagcacttgctttttgacgcggttgtaacgcagcaccatataccccatgtaacaggcaaaaaataccgccaggatcagaacaaacttgatccaatcggggacggaagtcaaaatatccggcataacgatctctccttatcctctgtctgcggtgcgctttgcgttttgggcggtatgcagtccgcgccgtttgcggatcagcgcagcgattgtcagcataccgcccgctgcgcaaaacgccagtgcggcaagggatgtcagcatcaggctgcggctttgcgcgtcgcccagatacagggccgaaaatcccacaccctccacgatcagattgacggcaacggcagcggctcccgccgcacagacaaacaggcagagatacagtttgctggtatcctgccgctgcagtgcgccgaaaatggaatgtccggtctgcggcttgatgcgtgacatatggttccctttcctttcaggcagattgaggcaaaagcgtaaaatagaaagagggggggggacggcttgccgaaatcccccctctttgcccgacattaccgcgcgttggccagcgcgtcttccatcatgcggataaagggcgtcggggtctccgacggaaccgtctgcgaatagagtttcaggttcatggaatccagcttgcggaagtcctcgatgtcctggggcgtgacagaaatgtgtttgccgattttttgtttgcctgcgccgcccgacatattgccgacggtgatatcacattccggcgtgtagccgttttcgatcagcgtcagcaggttggcgggggtcttggtcacaatggtgatccgttccctgccgtatttgccgctgttcagattggcggcggccgtgggggcctccagcacgctcaggcgcacgccggtggggcaggcgattttcagaacggatttcagcatggggtcattggcggacttttcgtcgatgaccatgatgcggttgcagttccaggtgccctgccagagggtcgccacctgaccgtggatcaggcgttcgtcaattcggatggcacagactcccataaatatcgctccttttttacagaataccgaagaaggtcaaaacgatgcagatcgcaatgatgagccacaccatgcggacggtcgtcatctgcttggtacccaggcctttgtaaatgccgaaggtcaccagcaccggcagcagataggggaagatggcgtccaggatatcctggatggactgggtggcatcgccgtaggaaaagaccatgggaacggagattttgacagtggacgggatcatgcagccgatgacgaccaggcccatgatggtcaccgcaccggtcagacccttgatgagttcctgcttggtggtgatgaaggaaacgccctgcttgtagccttccataaagaagaaatagcggataaagacgttgcagacaatgcacagcgctacgcagagcagcaggccgacgatggaattttccagcgccatatagccggccagggagccgaatatgaccttggagctgaccttaaacagcgagtcacccagaccggcaaaggggcccatcaggccggtcctcagcgctacggcggagtcggtgatgttgtcgacgccgctttcctccagggcaaggactgcaccgtggacgatctggcccatggtgttctcggtattgtagaaggtggacagatactgattgacttttttggagatcagttcgtcgtcgccggcgtagattttttcgatagacggtgcaatgatctgggtaaaaccgggcgactgcatggtctcgtagttgaaggactgccactgatagcacatactgcgcagcatggcactgcggacatcgcttttggaaagtttattcatcaccgacacctcccatattctgcgcttccgcgatacgaacattggtgtagtaggcgatcatggccagggcaatgcccaccagggccgcgcccagggcgcccacgttgaagtacgcgaacagcacgaaaccgataataacatactggaagttgcccttcagattcatcgagcgcagcaggatagcaaagccgatggcgggcagcatgttgcctgcattcttgaagccggaaagcagccactcagggatgacattgttgatggcctcaacgatgggcgcaccggcgacaaacaggatgatgagggggatggtggcatccagcaggatgcggggccagaagccgatgtggatccagcgcatcatgcctttgacatcctttttggcgatggaatcctgcgccttgtgcaggaagaaggagccgcacatcttggccagaacatccagagtggaggccagcgttgcgaccacgatgccaacggccatgccggtctccagaccggccaccgcaccgaaagccacgccgaccacaacgcccatgttgtagttggggaccgtggagccgcccagggggttcagaccgatgttcatcagttcatacgtaccgcccagataaaatccggtggtcaggtctcccatgatggcgccaacgaccagaccgttaaggacaacgccgccggctgtcaggctgataccggtgcccgaggacaggacattataaaaggtgaaccatacgatgatcaataccatttgcgggattgaaaacataattccaaccttccctttcttttgaatttcggcggaacacgcaccgccgttgatgttgctgggggaaaacgatctcggcttattcacctgccggcaagggggataagccctttctcaagtttattataccgacagcttgcgacaaaagggttcaaaaaattgcactaatgttaattcaaattgaaaacattgcacaacaaaaaagaagcccgcgcacaatggcgcgggctcagattgcagaagaaggcaaactcggtcgtcatcggtggatatggccggcaatgacgacgttgacgggaaaattcacgttaggcagtattattcattggggtagaacagcagctgcgggctggctgccgacccgtccagcaaggcgcggcggacttcggaaggcatatacagcagccggcgcaagatagcggaaagaactttgctgcctttctgggaacgtccgtggatgtaaaagacaaggatttgggccgaactccggttccagggaatgggagtgtcgttgagcagcaccgtgattttgggcgcaacggcgtccggcagcagtaccggcagaaaggccattccgttttcccgttccagatcgatcagggcatcgttgcggcgcagctcctccccggccgagtatcccaacggctgcagatcttcccggtggcgggcgtccaggaaatcaaaaacttcctccttgctgcgcagatgcacccggcagaaacagctgtcattgaggatgcgtgtctccagatcctgcttgtgggtgtccagccagatatccatttcggggcagtcatagtggcgcagcgtcaactctaccggcaggatagggatcgtgatctctggcagataccggcggattttgttgcggctcatgtcggtgatgatcagatcccaatcgtcggcatccgcctgcagaatgtcggaatatcgcagccctttcacccggcccagcatatccccgtagtaaaggcgcaggcgttcctccacggcccgggcacatccgacgccgaactccgataccaccgccacgttgggggcataaaattgccggggcgtgcgcagcagcagactgttaaagataaaaaagctctccattgcatcggtacggctcaggaaatagccgtaccgctcggcataaaaacgcgcaaagacaaggcagaggttggctgtcgctatcccgtagctctgcaccgcagtgacgctctcgggatcgttgacggtgtgaaaccggtgctgattggcaagacggtacagagtgcagcaggtctgctctacaaagaaattatcgaacagctggtctttcattccgaaatacatctgaaatcggcggatcagctcctgcaccgcggcaaggggttcacgcccctgctccgaggtcatcagggtcaggttttccgtctcaaaggacagaatcagcgcggtcagcatgtcggtctccggttcctggatcgcctggcggaaccggggcggcagtttgcggcagaaatgctccacaaattcgtgttccggcgcagaccggatgatctgccgctgctgctcatcaaacgcctgcccggagagatatttcttgcgggaggcacagagcatgagcagattgatgagcttgggaaagtggatcaccggcagggcaaactcccgctgtgccagaagatccgcctgaagcatggagtagatttgctcataacagggatcatccataaagaacatggcccggaacccgtactcatgcagcaggggatcgcatttatcgctctggagggcaatgtgataatttttgtgcagatggatcagaaactggcggatcgaccactcgtcgccctcgatgcccagtccggccccgcccctgcggttgaccagctgcagcccaaacggcgcgatcagggcgcgcaaacttttcatttcctgcaggatcgtcccgcgggaaacatacaatgtctgggccagtttctctaccgtgagcccgctgggcgaggagaggatctgccgggcaagatagtacacccggtcagagtagctttttttgacgcggcgcgaccgcacaaaaaaatcccgcatatgggcgaggtacggttccgcccggtgctcgtccagaatgtcgatataaacacctaccgagcgtttcatccggatacagtagccatgccggccggcttcccggttcagcagatcgatctcgctgcggatggtattgacagaaacatcgcagatcgcagccagccgcttgctggatatgggggtatccgcctgcaggaccagttcaaggatcttgtgatcgagttctgtcatcatccgttttcacctgcactaagctgtcaatcattttatcgaagccaaaaaagcatggcgtcattatagcatatcatggcaaaacaagtctataagacgtgaaaatctggaagtcattaacagtttctggtctcttttatctgcaaaaaagcgggacccgaaggtcccgcccgagataccatatgacagatgacaaaagccgcggccatcacaggaaggcggtgggcttttcggggtcgatgaaaccctcgccgtagacctcgctggtgtcggagatcatgaccatgcagctggggtcgatgcggtaggcggcggtgcggatggtgtagacctggggccgggcgcagacgcagaggagcatctggcgctcggtgccggtgtaggtgcccagcgcccgcagcatggtggagccgcggtccgcctcccgggcgatgcagtcggcgatctcctggcctttggtggtgatgatggtcagcatcttgctggagctgctgccatacatgaccttatcaatgacaatggaagtccccaccgtagtgatgaggccgtacagcaccgcgtccaccgagccgaacaccggccagcccaacaggatgatgaccaggtcgatgagaccggtcaaagcgcccaccgacaggtgggggcgcagcatcttgatggacatggtgaggaaatcggtgccgccgctggaagtgccgcgcatatacatcaaagccagcgaaacgcccaatgtgatgcccgcaaagatggcagccagcagagggtcgccggtatagccggggatgcgggtaaagaccacgtcctggaagaaggtgcaccacagcatggtgatgagggttttgcccaggaaggctttgcccaaaaatttcaggctgagcaaaatcagggggatgttgagcaccagcgtggtggtgccgatgggcagtccccacagatagttgccgatcagggccagaccggacagaccgccgggagcaaagtccgcgttcttggcaaaatagcagatactgaccgcgtacagaataccggcaaccagattgtacagctggtcaatgacgatggtgcgaatgtttttcataagcaaagctcccttgctctgatgtggggcatccgcccggccgggcggccgaaagcagcttcgggccgcggcagccgcggcggcaaaggtgcatgacccgggaaaaggaaagtcccgggtagtctggttttctgatggaaccgaacaaaaaagcgtccctctcattatgatcggacgccctcttttttttcctattgtaacactgtgaatggagattgaacagcccccggagaaaaaatctctccccgggctgggcgcgggcggcctgggcgtgtataatacagacaggaaaacaggcgtccctccgggggcggaaaggcggtacggatgaaaaagatcctggtgacgggggcgggcggctttgtgggcgcccgcgccatgcagcagctggcggaccggtatgagatggcagccctgccccgcgggatggcctcgacggcggaccggcagggcatcatcgagtttgtgcgaggcacggcgcccgatatgatcctgcacacggcggcggtgtccgacacgggatacagcgaagcccaccccgaggaatcccgccgggccaacgtggatttgaccctctggatggcggaggccgcccgggagacgggggcaaagctggtgtgcttcagctccgaccaggtgtatctgggcctgccgggggaggggccctttgcggaggaggacgtccgcaccccggcaaacgtctacggccgccacaagctggaagcggagcagcgggtgctggacctgctgcccgacgccgtcatgctgcgggccacctggatgtacgacctgcccggctacggcctgcccatccggggcaacctgcccctcaacctgctgcggtcggccctgaccggggaatccgcggtattttcctccaatgaataccgtggagtgacctacgtccgccaggtcatcgagaacctcatccccgccatggagctgcccggcgggtgctacaacttcggcagcgagaacccgctggacatgtacgccaccgcccgggccttctgcgccgctctgggcatcgacccgcccctggtgcagggggaccgggtgcgcagcctgtccatggactgcggcaagatccgccgggcgggcatccggtttgacgacacggcgcagggcatccgccgctgtctggcggactacggcctgaacaacttctgaaacacaagatcggccccgggagagaacgtctccccggggccggtttcttatttatagtatgacttcacacacccatgccgtcggcggccaggcgggtgtaggcgcccagcttggcccggaccagaggctgggaggggtccaggtaattcatctggcggatgttcttcaccgtctgatggggcgagacctgggaacggtactccgccgggcggcggccgaaggtctcggtgaagcggttgttgaaggacttgagatcggggaagccgttgtcgatggccacctgggtgaagggcttctgggtggtggccagctcgaacagggcgtgctggaaccggatgcgggtcaggtattcgtagaaattcatccccatggtgttcttgaaaaaggtggagatgtaggtgcggttgtatttggaaatgcgggacagttcctccagggtgatcttttcggcgtagttggcctccacatactcggtgatgcggcggatggtctcctgatggagggagtcctccttggacagggtggggaccaccttgggggagcactcggtgcacagggtggccagcagcatttccagggcgctcctggcccccagagaggcatactgcccgccctgtccggcggcggtcatcaggctggcagcacagtaccggatgcggttgtaccggggatcaaagcggtccttttctccgcagacgcagccggggaaggaatacaggtgttccggtttcagaaaatcccggaaggccccggcggggaagcgcagcaccagggccacggtgtgctggtccagggcaaaggaggcatggcccaccgcggggtcgatgaggatcaggtcatcctcatgcaggacatacatggaactgccgcggcagtattcggcgctgcccttgagcacgatgttcagctcatattcctgttcgtgccagttgtagcggaaattcatgatctcgtgggcatagcaggtgaaccccagcccatcctgcggccattgcatcgcgtagcgcccgtccatccggcagcctcctttctgttctgacaaaagaatatcacatttcaaatattttccctatggtttttatttgaatccgggcaaaaaatgcctgtccgcaagcgtctttcatgcccggacacaccccgccgggagcccccggcagaggcagctgcttcgtcaaagtgctcaacaaaaaaaggtgccttgcagcacttttgacagggagaatgtttgactttggcaatttcgcacaaaaaaatccgcccttgtaaaactgcacaaaaaagacaggcggcaaaacaaaatttcaaatattatcaccgacagcatccgttttggctgatacactggagacaacaagacaggaaccgtcccgggaaacgatcttctgttgaaacagccaccccaggacccctgcacaggggcctgacagaaaggatgtttaggatgagcgaaaatacccaactgatcatctgcctcgtgatttttgtggcatcgctggtcagttaccttttgaacaagatccccatgtggatcaccgccatgggcgccatggtgcttctgatcgtcaccggctgtctggacatgaccaccgcgctgagcggcctgtccaacaccaacaccgttttgatgggctccatgttcgtcgtcgccgcgggcctgagaaaaaccacctttgtggataccctctgcaccggcgtcatgaagctgacccgcggctccttccgcaaagcctacttcggctatatcctgatcgctgtgctgctggcccagctgatccccagccccatggtcgtctttgccatcgtctcccccctgctggctgagctctgcgtcaaggtcggcgagagcgtcaccaaggtcatgttccccctggtcgtggtcgccatcggcaccaccggcatcctgcccctggccagcgccgtctccgacgccgcccagtacaacggcttcatgcagacctataatatgaccgagtacaccttcaccgccatggacttcaccatcgcccgctggcccatgctgatcctgatccccgcctgggcgctgttcctgggttccaagttcatgcccgacaagcccagccagcccattgctggtgctcgcggcgcaggccagaaccagaaaaaactctccaagttctccgatattgccggtaccgtggtcttctttgccaccatcatcttcctggtcctgggcgacgccctcggcctgcaggcctggatggtcgctctcatcggcagcatgctcatggtcctgtgcggcaccctggatacccgtgaagccatgagcagcctgcctctggacagcatcctcctcttcgtcggcgctcttgccatgggcagcgccctcagcgccaccggcgcaggcgaggtcatcggcaatgccctggccggtgtcctgggcggcagcaccaacagctacctgatcggcggcctgttcttcgtggttcccttcatcatcacccagttcatgctcaaccgtgccgtcagccagatcttcatccccctgtgcatcctgacctgccaggccctgggcgccaaccccgtcggtcccatgatcctggtcaccgcaggctgcctgaccgcctacctgacccccatgtccacccccgccatccccatggccatggccgccggcggctacgacctgaaggacctggtcaagggcggctggctgatctccctgctgatcgccgtcgtttacatcttctacaccatgaccgtaatgccctgcttctgatggcataaaaggaggtaccctgcatgacccggcaagaaatgatcgagactgcccgtcaggtccgtgcccgcgaccccttccccccggccacgccggaggaactggccgccctgcccgccgacgagaaggaattttatctggaggccgacggacaccgcatccatatctatgagctgcgtcccaaggccgggctggaagcaaactgccccatgctcatcaacttccacggcggcggatacatgaaaggccgctttgaccgcgaccgcatctattgcagcaacctggcggcccagctgggcgccctggtgtgggacgtggattacagcctgtccccggaggagcccttccccacggcggtggaggaatgctgcgccgcggcggcccacgccttcgcccatgcggcggagctgggcgtcaacggggacaagatcttcctgctgggtcacagcgcgggcggcagcctggtggctgcggtctgccagaccttcgccgccagcaacggcccccggccggcggcggtgctgatggaatatttcccggcggatatgaccgccgatcccatgtccaagctcaacgcggaacagctggccgatccccgggaggtccgccgtgccgagaccgcccgtctgtacaatgccttctactgctctgtggaggaaggcaagaatcccctggcatccccggcctttgcccccgacgaactgctggcatggttccccgacaccctgatcctctccgcaggcaaggataccctgtgcgaggaggacgaggccctggccctgcgcatggcccgctgcggcgtcaacgtgacgctgcgccggttccgacagtcgccccacggcttcaccaccaaccgcatgggcgaatgggaggaagccgtcgccctgcacgcggcgttcctgcgtgcgcatctcgactgaaaggcaggagatccctttgaaaatcaccgatctgcagctggtttatgccaagcattacctcttcgtcaagatctacaccgacgccggcatcgtcggcctgggcgaggcgggcaactggggcttcctcaacgccacggcggccgccattgaaaaattcaagccctatctcatcggcaaggaccccttccgtattgaggatatctgccagaatctctaccgcgcccagtatttccggggttcggtcatcatgtccgccatctccgcggtggacatcgccctgtgggacatcaagggcaaggccttcggcgtgccggtgtacgagctgctgggcggccgcgtccgggacaaggtgcgggtctatgcctcggtcatgaccaaggaggatgacccccacgccctggccgagggctaccgcgacctgcagaagcagggcttcacggcggccaagatcttcgtcaacggccccatccgcagcgccaacggcggcatggatgagttcttctccggccgcatcgaggacgagctggaaaaggtccgcatctgccgggaggccgtcggcccccactttgatttcgtgctggaggtccaccggggcatgaccctgcccgaggcggtgagcttcggccgtgcggtggagcagtaccgtcccatggtgctggaggaccccgttccccccgacaacatcgacaccatggcggaggtcgcctccaaggtgggcgtgcccatcgcctccggcgaacggttcatcaacctgcgggagttcgagatgctcatgagccgccacgcggtccagtacgtccgccccgacgtctgcgcggtaggcggcatcaccaccaccaaaaagatctgcgccctggccgaggcccacgacgtgctggtcatcccccacaatcccctggggccggtgtccacggcggcctgcctgcagatctgcgcctgcatccccaacctgggcatccaggaattgccgggcttctgcctcaacggcgccgaggacgctatggtcaaacagccgctgcgctttgaaaacggctgcatgatcctgcccgacgcccccggcatcggcattgaactggcggacaacgccaccgaactttatcctcccaaggaacgcagcagcaacgaggctcgccgtgcctttgacggctcggtcaaagactggtaactctgccgtttcccttcccaagggcgcgcccctgccggacggcagaaccgggcgcgtccttttttgcgcggctgcgcacccgattttcaaaaggaggttttcccgtgcaatacgattttgataccgtcatcgaccgccggggcaaggacgccatggcggtggacatccctgccagcggcaagggcgggcattatctggcccacatccaggtggagcccggctttgactgcatccccatgtggatcgcggacatgaactttgccactgccccctgcatccccaaggctcttgccgagcgctctctgcacccgctgtacggctattttcaggagaccgacgcctactatgacgccatcctcaactggcagcgggaccgccacggcgtcaccggcctgacccgggagtgcatcggctacgaaaacggcgtgctgggcggcattgcctcggccctgcgggcggtctgcgcccccggggagccggtgctggtacattcccccacctacgtgggcttcacccataccctggccgacaacggctgggaggctgtcctcagccccctcaaaaaggatgagaacggcgtctggcggatggactttgccgacatggagcaaaagctcaaggcccggcacatccacgccgcggtgttctgctctccccacaacccggcgggccgggtgtgggagcggtgggagctggaacagatgatggaactcttcgcccgctacgacgtcaccgtcatctccgacgagatctggtccgacctggtcctgccgggatacacccacatccccacccagtcggtgtcggaggacgcccgccgccgcacggtggctttctatgcgccctccaagaccttcaatctggcggggctgaacggctcctaccacatcatttacgaccccgccctgcgggaccgggtgcgccgggccggacagcagacccactacaattcccagaacgttctgtccatgcacgccctcaccgccgcatacagcgccgagggcgcccgctggctggaggaactgctgcaggtccttgaccgcaacgccgactatgcggtacgatttatacaagagcatttcgacggcgtcacggtggcccgcccccaggggacctacatgctcttccccgattgcagcgcctggtgcgccgctcacgggcagaccatcgaccagcttctcgccgccgggcaccgggtgggcgtgatctggcagaatggccgctccttccacggggaaggctgcgtccgcatgaacctggccctgccccacagccgtgtgcaggaagcctttgaccggctggaccgctatgtcttttgcgggtcccagcccaagtaaaacgggaggtaatacagcaatggcacaaaagtatccccatctctgcgcgcccatcaccctgggtcgcgtggtgttccgcaaccgcatgttctccgcccccatgggcggcaccgacatcacggcggactgcagcgtgggtccccgcacccccggcttctatgagctgcgggccaagggcggcgcggcggccgtcaccgccagtgagctggtggtccaccccgccaccgatgcctcccatatgttccacctggacctcaagaccccgggcaatctggccagctggacctttttggctgacgccgtcatgcgccacggggcggtccccagcgtggagctgagccactccggccagtacgcgggcacctacctcatcgacaaggacaaaaagaagggcctgacccagtacggccccagcgactgggtgcgccccgacggcatccccgtcaaggccctcaccgccgagcagatcgacgacatcgtcaaggcctacggcgacaccgccgccctggccaagcgggcgggcttccagatggtcatggtccacggcggccacggctggctcatcaaccagttcctttcccccgccttcaaccaccgcaccgacgagtacggcggcagcctggaaaaccgcctgcgctttgcccgccgggtgctgcagtcggtgcgggaggcggtcggccccggcttccccatcgagttccgcatgagcggcgccgagttctttgagggcggctacgacattgaggagggcatccgcatcgcccagagcgtggaggatctggtggacctgatccatgtgtcggcggggtcctaccagttcggtttcttctgcacccacctgcccatgttcgcgccccacggggacaacgtctggctggcggcggagatcaaaaagcacgtttccaagccggtggccaccatcggcggcctgaacgaccccgcccagatggaggagatcatcgcctccggcaaggccgacgtggtggagatggcccgcgccctgctggccgaccccgaactgcccaacaaggtcatggccgggcgggaggacgagatcgtccgctgcctgcggtgcttcacctgcatggccgagcgccccaccaccggcacccggcgctgcaccgtcaaccccctcatcggccgtgagtgcgaaggcaccgaggtcctgcccgccgcccgcaaaaagcgggtcgtggtggtgggcggcggcgtgggcggcatgaaggctgccctcaccgcggcgcagcggggccataccgtcaccctgctggaaaagaccggcgagctgggcggcatcctcaagagcgagcaggccctgcccttcaagtatgagatgtaccgcctgggcctgaccctggcccgccagatggaactggccggagtggaggtccgcctgaacaccaccgccacccccgaactgctggccgaactggcccccgaggctctcatcctggccaccggcagcactcccatcgtgccgccgctgccgggcatcgacggggacaacgtggtggtcgtcaacaactactacctggaaaaggacaaggtgggcgacagcgtggtggtgctgggcggcggcctggccggctgcgagtgcgccgtccatctgggtatggagggcaagaccgtccatctggtggagatgcgggaccagctggcggtggactgcaacatccgccaccgccccatcctcatgcagatggtggacaagtacaccaccgtccacctgaagcacgccggtctgcgcgtcaccggcgagggcctggtctgcaaggacgaggccggcaatgaggttctcatccccggcagcacggtcatctgcgccgtgggccagcgctccaaccgcaccgccgtggacgagctgcgcacctgcgccccctgggtgcgggagatcggcgactgcgtccgcgtttccaacatcaccaacgccgtctatcagggctatcacgcggctttggatatctgatctctcctctcctcatcccatccatccgcaaaaaagccaccgccgtccggtatctgccgggcggcggtggcttttgctgtgtaaaggcagcgagagatcaggaaaggctgggctggggctggacttgggcggcgcggtcggcttcggcctgccgcaggcggcgcatctccccacggaccaccaggaccgaggtgacaaaggcgatgaagtcggcaatgggggcggtgaacaggatgcccgtcaggccaaagaaccggggcaaaatcagcagcagggggaccaggaagaacacctgccgggtcagggacagcagcacaccccggatgggcttgccgatggccgcgaagaagttggaggacagcagctgcacgcagttgaccaccaccatgaacaggtagcaccgcatgaacatgactgcgaactcaaaatacaaaggatcgccggtgccaaacagtgccacgatctgccgggggaaacactcaaaggccacaaagcccaccgccgagatggcaaggctgatcttgatggccagggcataggcgccccgcacccggtcgtactggcccgcgccgtagttgaagctgatgatgggctgggtgccctgggagatgcccacgatgatgccggtgaggatggcgttgaccttgatgacgatgccgctggcggccagagggatctcgctgccgtagaccgacagggcgccgtagtaggtcagggagttattgaggacgatctgcacaaaggtgatggccagctggttgcagctgttgctcagccccagggaggcaatgcgcttccattcccgcagggagggtcggaaatcaggcagggtgagccggatgttgcggaacagccgcagatagttcagcgccatgaggaaggacgccgcctgaccgatgacggtggcccaggccgcgcccgccaccccccagtggcagacaaagatgaagatggggtccaggatggtgttgataacggcgcccagcagcatgcaggtcatggaataccggggactgccgtcggcccgggccaggttgctcatggcgttggtgatgatgagcagcggcatacccaccgccgtgatgcgggtgtagtcggtggcgtagggcatgacctccgccgttgcgccgaacaggcggagaagatagggcaggaacagctccacaatgaccatgtaggaaagccccagcaccaccatcatggagaaggcggcccccaccgtgcggcgggcctggtcgttgtccccgtggcccagactcaggttgaaccgggccgcgccgcccacgccgatgagcagggcgatggacaggcagatggtggtcagggggaaggccacgttggtagctgcattgcccagataccccacgccgttgccgatgaagatctggtccacgatgttgtacagcgaactgaccagcatggccagcacgctggggatggcaaagctgcgcagaagctggggcaggggccggacgcccaggggattgggctgggcggaagcggtattactgctgggagccatcggcgtgttcctccttgttgttttcctccacggcgcgcagggcgatggcctccatcacctgcagggcaaagtcccgggattccggcgccaccgcatccagcaggcggtcctgccattcgttgcagatggctttgatccgggggtaggcctcccgcgcccggtcggtggggaacagctgataggtgcggcggtccttgctgctctgccgacgcagcagaaagccgtccttttccagcgccaccaatgcccgggtgatgttgctgggattgacgtaaaacatggaaaaaaactggtcctgggtgatgccgggatgctcgcacactcgcaggacatatttatactggctgctgcccagccccaggggggccagggcgcggtccaggtgcatggcggtgtaccggaaccccactgacagccatttggcaagggtttgctccatggaaaaacgctccttctgtgtggaatacccccagtatagcacaaggtctttgcgcacgcaataataaatttgcgaacgcaaagaccttgtggggcttttgcaaaccggaaaagtaccaccccgacgggacagagaaaaattccctcacggccgggctgcgggaaagtcggctcgtagaagttctgacacggaaactatggaccttgtgtatgtttttgggccgtacagaaagaccccgccatgaccgcatttgcggtcatggcggggttggtgttatggggagaaaacgctgccgagggctggtttagtagaagatgtatccgccgccctgcgtgacatcgccgttgccgtcgccggggatgattacgccgggaatgtctgcctcagggtgcgaaatgccgcccgtcaccccaccgtcaccgccgcccgacgccccgccgtcatccgtcgccggggcgggctcgctgggggcgctctgttcggcctggctggcctgctgctgggcggctgcctgagccgcggcctgtgcagcggcagcggcggcctggtcggcggccttttgggggcagccggaactggtatggccgctggcgccgcagtagctgcaggtcacctttttcaccgtcagcgcatagctggcgctgacatcgccgccggaggtgcacaccgtaatggtggcggagccttccgctttggcggtcaccttgccggtctcgctgacggtggccaccgcctcgttgctgctggaccaggtcagggtctggtcggtggcgtcggagggcgtcaccgtcgcccggatggtgtgggtgctgcccacgctgagcacgccctcggcggaatccagcgtgatggcttccggctttttcaccaccgtgactttggtttccacccgggcattttccggggcaatgagcataccgctgtcgagttcgctgtcctctgccgttgcgggggcatccgccgcaatggtggtgacaatggtgcattcgcccacgcccaccgcggtcacattgcccgcctcatccacagtggcgacggattcgtcgctgctctcatagatgagcttgacatcggtggcgtcctccggggtcatcgcggcccccagcgcccgggtgttctcgccgttgatctccagccgcagcgtctcgggagcggtcacgccctggggcagaatgaccaccttgatgtgcgttgtgacgctgaggcctgccttttcggaggctgcggtcacgtctgcctccccggcgcccaccgccgtgacaaggccggtttcgtccaccgtgaccacactgtcgtcggaactgctccacaccagctccagtttttcggcggcctttgccacctccgccgtgtcggcttcatctgccgtgctgtattccagttccagctgcctggtctcgcctttttccagcaccaggtcggcggggagccccaggctctcgatggtcacaccacagcccgccagccccagcaccaggcagcaggccagcagcagagaacaaaaccgggaacgcaaggatgacatggaaatgattcctcctttgatttagcacttttccattctgtcatttgggttatagtgccaaaaagcaaagaagttcaagagattcctgaaaaaatccgatcgatctaaaaccgggcaagaaaagcgcggatgcacagtctccccgcgacggcatgaggggaaaagctcggtatggtttagcggtttatctggtcgtggtaggcggagcagatggtttttacacattcctccatgcccagggagccgctgttgaggcacatatcgtagttttccgcgtcaccaaaattcctgccggtatagtgctgatagtaggaacggcggtttttctccagcttgtccagatcctcggtcggttcgcggtagacggtccagacgcgggtttcccgggtggcggcgtcggcgcagacaaagacgcggaggatatgggcctggtccgccaggatggcgtcggcgcagcgccccacaatgacacagctgcccttggcggccaggtcacggatgacctgcacctgctgcaaaaagatcttgtccgtgatgggctgtgtgagatgaacatcgttggaaagccggtacagcagattgccggtgtccttggtttcgctgttctcgaaaaagcggatgtcgatgtcgctgttttttgccgccagctcgatgatctcccggtcatagaaggggatgcccagctgtttggcgaccttctggccgatctcccgtccgccgcttccgtgttggcggctgatggtgatgatggtgtgctccccggccggggcggggctttcgccggaggcgttcagctccccggcccattcaaagcctttcttggcggtgatcacggcgatgacttcattgatgacggccgccgccgcgatggtcccctggacgatcttggcgcagtcgggggcggggccggacagcacggagaccgcgatgccggtaaacacaagggaaacgccggagtgggggagcagggtcaggccgagatatttctttacggtttccggggatctggtgatgctggcgccaaaatacgcgccgaagtatttgcccgctgcccgggccagaatgtagatcacggtgaacaggccggcccccaggatcaggtggtaatccagcggcgcgcccagattcaggatgaccacgatcatggccacgcccaggaccgggctgaagctctccatgatctgttccagccgtgtctcggggagcatgttggcaaaggtggcggaaaatgccatgccgatgagcatgaagttcaggatggggctgggcaggaccagcgtgttgaacacaaagcccaccgccgaggttgccacgatcagccccagcagcagggccagcgtggcctgtttgctccgctcctttttcagcacaaaaccggccacaaagcccatggcgatgccgatgagcaggggcagcacaatgaccagcacgatcatgtaggcgggcagcgtcccggcggaaaggctgctggccacggccgcgatggtgataaaaaagacgatgcagcccacaatgtcatccagcgccgccatggggaccagggtctgggtgaccgggccggtggtcttgaactcccggacaatggacagggcgggcgccggggcggtcgccagggcgataccgccgaaaatgaacgccagatacagggggatccccgcaatggaaaatacgatgccaaaaacaagggaaaccaccgcaaaagtccccagagactgcgtcagggtggtgatgacgatggctttccccgagcgcttgatcttgttccagacaagttcggtgccgatcatcagaccgacgccgcattccaggacgtgcacgatggtctgataccaggcggcgtccagaatctcctggctcatcagggaaagggcgtggggacccaggaccatgccggtgatcagccagcccagaatggacggcagcttgatttttgagatgagctttcccgcaagggcagcgaccccgatggtgaggagcagtcgcaacaacagaagcagcatattggttcgcccggcctttcttgaccaaaatttttgcagacaaaacgagaggggtggaacggcgcgccggaaaagcccggcgccggtctcgcaggggggatgcccgggggcttgcggggacccggggcgcaaagggagttgcgcagatccgctcggcgagactggctcaggaccgggtttccggcggctttttggcgatgccgtagagcatgacgtcaaaaatcgtggacagggtgccctcgtgggcctggatcagggtgcggtagtcaccgtcctgccgggctttgttctggaaatagccgttgaacatttcgcacacggcggtaaagtattccatggccacggtcttggtgaccgtatcccgcagggtaaggtggtccaggacttccagataacactggctgaaatagtcgtccaggtccttgtgcaggcggtcgagctccgggatcagatgccggggcggctgcagcacggcgttgaaaaagatattggcatacaaaggattttccgaaaagaagttctggcggatcagcaggaccttctgcagcccctcttcggcgctggtgatcgtgaagggctgggccttgaaggcggcaatcagctggtcgtagcagtgcttgacacagtggagatacagatcgtccttgcttttgaagttgtgatagagcagccccttggagatctgccccgcctcgcagatgctgttgatggacgcggcgtcgtagcttttgctgccgaactccaggatgcccgctgcaaggatgcgctcccgggtcaggcgggtcttttcctcttttttcatggcggcccctccttggattatagactgtatggtctattatagagaaaacagaccgctcggtcaataattgaggtgtaaactttttatgacggggcgggagagctgtgccgtgcaaaaaccttgcctggcccggggacttttgcccgcaggcggcgggcctgcgcggcggaggatggagccgccgcgcagggggagccggtgtctccccggcgggacgatcccagcccggagcagacacaaaaaacaccggcgcaggctggagggcttccaggctgcgccggtgctgtatgatgctgtgcggctgccccttgccgggcaaaaatcaggcggcaggcaggtcagagggcaaactccgccaggcggtacatctggccgtcccgggggacatccatttgcagggcgaccccggcctgcccggtgagggggtcctcgatgcccgcccacagggtgtagcgcccggcgggcaggtcctccgcccccgccagggcgacggacacggtctggtccgccaggccccagcgggaaaactcctgagggaaacggccggaccaggcgaccgcgccctctgcgtcccgcagttccaatatcaggtcccagtcggcgtacaggggagcgatgccggtgttctgccaggtcagttccgcctccggtatggaggacggaaaggaccgccgcaccacgcagcggcggatgccaagactgtaccccatctcggccagcagggtgcgcaggttttcctcctcggtgccggaaagctccccgtaagccggggcattggggccgagaaaggtggtgtggctctgccgcagcagggtcagggtggtggaaaactgactgccggaaaaataccagccgtcctcctcatggggagagaactcgcccccggagggcgcatcaagccagaaatccggcatggcgggcaggtgctccccgttctggtcggactggtagccgttttcgatccaggagagccactccccgtgggaatccggcaggccgaaggaatcgttgtacagccccagaccccggtcccgggcgatggcgtaggggcggcgcagcagcagttggccgggggaaaatacggccagataatcctccacatagccgtcggtgacgtcctgggtggggaagggggcgatgcccgcgccggtgtccacgtgccattccccccagtggcccaggctgcccagctggagaaaggccacctggggatcgccggcatagcgctcccccaaggcggcgatgagggcgcggtgggcctggcggtagacctcgttttcatagtcggggctgaacccctggccgtagtccccgtcgtaccaggtcccggcgccgtccatggcgtcgtacagccactggggaatgtccatgtggggctcttcggtgggcgtgtcggggaccaggcgcaaaatcagccgcacgccgtcggctttccactctgcaaaatggcagcgctcttccagggcggcaaaatcgtattccccctgccggggttccagctcgttccagtacaccggcacataggcaaaggccacgtaggggtcctggcggtagttttcaccccaggcggccaggcctttcatgggattggtgaccggcttttccccctggggcaggtctaccgccgccagaggcagccgccaccgcagcagcgccacggcggccagggcaagagccagaaacagcagggaaagcatttgtctgcgggtactcatcagccgtccaggttgccgtggtactccaccagcgtgacgtcctgcacgccgtcgatgtcctgtaccggccgggtgatgttcaggttatcggttttcaggcgaagttccatggtcagctcggtggtcccgcccttgaccaccttggagcggatcttgcccggctggtcgtgcaggcagcggcgcacggcctcctccacctccggctccgaccggtaggtcacgatgaggacataggtgccggtgttgtttttcatccgcttgaggaagatgagggccagggtgaccacgatccaggccacaaaagcgatgtagtaatactgcgccccgatggcgatgcccgacgtgatggcccagaacagaaacatgaggtccaggggatttttgacggcggtgcggtagcgcacgatgctcagcgcgcccaccatgcccagggacagggtgatgttggtgctgatggtgacgatgatgacggccaccagcagtgtcatgatgactagggaaaggttgagggcatggtcgtacaccaccccgatgtagcaccggcggtacaccgcaaagatgcccatgccgatgagaaaggcgatggccagtgtcaggatgagggtcagcggttcgatctgggtggggaacagttccagaacggatttcttgaacagatcttgaaaggacataggtgatgattcctcctgtattgcgcaccgttcagcgcagggtctgccggacctggtctgcgcagaggcagaatttggaggcagacgtcctgacaaaagagtgggcgcgaaagatgcgttgaatggactccggcaggatgccggtgaacttgacttccagaatggtccggccggggggcagtacatgatagccgggggcggcggggtcaaacagatcctcccgggcgtccatggcggtgagaaaccggtcaaaggtgatgcgcaccgtgcccacgtcgttgacaaaggcttcccggtcgtaggccacgatgacgcaggggcggatgatgctggcccgggcctccacaaaaaactgatgggccaaaggctgcggcctgcgcagcagaaaagcgcagtcgccccggcacagggcctgatactccgccagggagagggagatggcatccttatagatgtaggcgccgtttttgtacttgcattccagggcgatatgcccggcggcgcagttgtaaatgcggacccggtattttttgcgaacctccacccctgccattttctggcggtaggcggtgtggtagatgtcgtcaaagtacaggctgcggatgtggtagccgccttccgggccggcgtgggcgtcgcgggccagcaccgggcgcagcaccgattgcagctgcaaacattccgactggtcgagcagaaatttcagctcgttgcggtaggcgggggtcatccggtcacctccgtgcggtccacgccgggatagtaaacgtcgttgacctggatcttgttcatggagggggcggtgcggccgtcccgggtggctgcggtgacttcaaagtaccaggtcccggcgggaaggtcggcggcgggaacagtgtactgggtggattccagcccgctcacatccaccaccgggttggcaaagtccggcgtggcggccacccgcagccggtaggtgatgggctggttgtcaaagtcgtaggcatcctcccaccagaagcggacgctgccgttctcctgcaccggttcgtacatgaaaaagggcatcagctcatgcaggctgtcgtaaaactgccggtaggccagctccacctggtcccccagcccggccaggatggtatcccgctcggcctcggtgttgcccagatagtaaaagtccggcatggacagggcaaagggccgcaccaccgtgtcgtactgctgcgccagggcgttgacggtgtcccggttgatgatctcatgcagttcgtccaccttggcggccagctcggcgcggttggcctcgtttttcagaaagcgctgatgcagcagcacgccccagtagttggccacgccgtgttcccagctgccgtagttgccgaggatgccttccacttcgtcctcctgccagtggagggagttgtctccgtcccaggggatgaagaaccatttctgactattgaggggactgtacaggtagaaattctgcaccgtggtgtcgttgttgcccatgaggatgttgtaggccagccaggtgaggtagttctcccggtcgatgtagtcgcccacgatcacgttgatgtccacgctgcggtcagcgatgaggttgaccaggtcgatgagcttctggttgtcctgacggcccttgcagctcaggatctggtcaaaggcggcctggtcaaagtccgggtcgtcaaagtttttcaacgcgtcggacatttcaaagttgaagctgatggccttgtacagatacccctccgggtcaaggccgtggttggccaggtatttcttggtggggacctccgcctgggtgaacaggccgtaatcccggaaggtggtctcgcctgccgtctcgtccttgatgtacaggcgcacgaactgggtacgcagactggaaatgtcctccaccgggcgcagcaggtcaaagtagagtttgttgcgcaggcgggtggcgtcaaaattgtgcttgttcagggcaatgttgctctgcccgcgccacagcccggcctcgtcgtccaggtccagcttgtaggatttctggggccgtaccgaggaggaattcccccgcacccggatggtggcgttgctggcggtggcctcgtagcccagcatgccgggctgcggccccgtctcgtcccccacctggacgatggcccgggcaaaaatgtcgttggccacgtggctgtcctccacaaagcggacggcgctgttgacctccgcaaaggaatgatcggtgtccgacccggcgtccccccgctgtaccgtgacgtaaaaatacaccacgctcaaaggatcgtcgtcatcgtagatgcttttgttttcctccatgcccacggtgtcgatgtcccgggcggtctccacggtggcaaagccgggggcggaagtggcggtgggagcggggacttccgtttcgccgctttccccggcggggcgggataaggtctgccacagggcgatgcccagagccagagcgatcagcagggcaaacaggagcagttcgattttgtttttgcgtttatccacggggcgtcctcctttgggcaaaggcccggtcgatgcgggtcagggtttcctcggcgcggcagagcacgccttccacgggctggtcaaaaaggggctgacggcagaaaacgtggtattccagccggtccagataccggcgcatccgccgaagcacccagaacccggtgacggcgctggccgctagaaagccgctgccccaggtgtccggccccagaaacagggtggccagggtgctcagcgtgctcaccccggcgaacagccccgccgcccggcaggccccggtgcggtcgtcaaagtagagcagcagcacgatggcgcatttgacaaagccgtacaggcagtagccgaagcacaatacccggaaggtcccggccatggtctcgtccaggcccacggtctggagaaagttgcccagaaaggccaccgaggcaacggctacgatgcattgcagctgcaaaaggtgggaaagttcggcgtagagggtggtctccatctcctgtttggcggcgcggatctcctccagccgtccgccgtacaggatggcgtcaaagtaggcccggtgcttgacggcaaagcgggtctccagccccacgacgaactggaccagcatgggcaggatggtcagggtggcaaaaaaggaggggacgtcgtaccgggcacagtagaccccggtgggaaagacctccacccggtaggcactggcccagaagatcaggttgtggccgtacagccccacccccaaaagcagcccggtgagcagcagcacgccatagcgctgcaaagcggggaaaaagaccagcaggttccagcccccggcggggtaacaggcaagcagctgccccatgtacagaaacatcaatagcagaaatcccagggccgctccccacagggcggcggtgagaggttcggccccggcccgcagcgccgcccaggtgatgaccagcgccgccacggtggcggccacaaagcccagcagcacatactcgtaccgcttgacagcggagagacaggacatctgcacccagaccaccagcagcacgcagaacagcagcagggccgccaggcggaccggccatcccacgggtagggtcatgaggtacagggcggccgccggcgcgccgaggaggagcagaaagaacaccacaccgtaaaaggcgggcagaacgtcctgcaggcggcgctggtagatgcagtccgagataaagcggtccacaaacagcagcaccgtgccggccaaaagcagagaaaagatcatggcgtaggtcataaaaaagagaaactgttcccgggtgcggtaggaggccccgcccgccgccatcagctgccgcagggccagaagcagcacgatcatcagaatcatggggccttcggtgacggcggcagccagggaataggtccgcagggccgaaaacacgctgccgccccgcatcacctttttcagttcaaagccgatgcctgccacgggcggttcacctccttggtatgtacggcgtcccggtaaagctgccggtacgcggcaagaaaatcttccttccggtaaaagcgtaccacccggcggtaaccgttttccgccagcgcccggagatgggcggggtgctcgctgatctccaggatggcgtcggcgatggcgtcggggctcatgaccggcaccacccgcccggcggggccgatgccgtcgtccgcgccctcgatgatctcccggcaggcccccacattggtggccagcaccgggcgtcgggcggccatggcctccagcaggacaaagggctgaccctccgagatgctggtcaaaatcaccaggtccagccggggcagccaccgggtcacctccgcccggcccacaaaccggatgtcccggcagtccagccgccggatcaggtcctgacattcccggtaatagtcggggtcctcgtcatagggaccgatgaggtccagggtggcatcggggcggcggagcttgacacggtggaagctgtatatcatcgtcttgacgtccttgatggggacgatgcgcagcactgccccgatgtgcaggggatggggttccgggtcgggcggcggaacggcggcaaagcgggcaatgtcgatgccgttggggatgacccggcatttgtgctccggcgcgcccagcccgatctgcagctcccgcgcgccccggaacagggacacgatggtgtcggcctgacggtaggcggccaggctcagcgcccggaaatgaccgatccaggtgggtttgaagtaggccgggacccagtccgccttgagaatttcctcctcccgctcccgggtgtagatgccgtgctcggtcaccacaaagggcttttgggaaaagtagctgaacttggcccccagcagcccggcgtacccggtggataccgcgtggtaaaggtcggcctgggggacggggcagcgcagcagttccagagcgggcagcagcatggaccgcagcgtccagaacaggtctttgaaaggcgtgttgcggcgggaaccttccgccaggctctgcaccagggcaaggaaatccgccgacatgagaaaggactgcaccggcagcgggtccttgccgccgaacagctcaaacagggtgggccagtgaggagcgtcaccccgcaccaggtcggccagggcctggcgctgggcgtcggtgagagggcggtgccgggcgggagaaccgggggcttccagaggctcgtccagaaaatattcccgcagctccgccacgttggggggcagttcatagcggaactgcccccgctggcggctttccgccccgatggatacgatgaggaactgatgctcgggtatctgccgcatgagcatctgcacccaggcggacacgccgcccaccacataggggtagcagccttccacgatcagacagattttcattgtgtcaccagctttacggtaaaattggggcgatgcaccgtgacaaggtaataacccgcgccgctgccttcgctgatgggacggacggtgcaggaatcgtccgccgccttgggggtgcggtcggtcttgaggtaaaagcagacctcgcccaggcagttctccacgctgccccggatctcggtgtcggtatagaccaggtgaggctccgccgcgtcataaatgcgcagggcgtcggcggcctcggtggcggacagggcgcgcagccaggggtaggaggcgtggatgtcccccatccagctgcaatagctgcggtaaagttcctcccaggtctttccgccgctgcggtcggggtcaaagacatcgtcggggtggatgaagtgggaaaaggccccgtacaggcccagggcgctcagggcggacatctgctcgtaatcgtccgggtccatgcccgccgtcacccggggaaactcggcgatgccgtcctccgatacggtgaagtcctggacatagacctccccttcctcctcctcgttggtgtagatgccggagatgacttccaggtcgggcagggcctgcaccaccgcccggcggccctcctgactcaggtagttggagggcggcacgtagcagcgcagggtcacggcggggaacagttcggcggtgatgtcccccagcgtggtcagggaggcggtcatgtcctccacatccgcccaggggcggtagttcatgtccgcgggggtgccgcccgccaaagtcaggggctggtggttgtagccgtgagctcccatttcgtagccgtttttcaaaaggctgttgccgaaatacagctcggtggaggattccgtataggtcatggcgtcggggtcggtcaggtcgttgtaggtggcaacgaacagcccggtgtacacatcgccgtaggctttggcaatctggagcatgtccggccaccagatgtcccggtaaaactccttggcggaacggttgtactcgtcccggaccacgtcgctctcgctttcgtactggggggagggaaaatcgtcgatgaacaggcacagggcgttgatgaccggatacataaaggtgtcggacagggtgttgacgcaccccgccacgatgccccgccagaaatccccccggccggaggtggagttgaacacggacacccggccccggccgcagtcgtaggaccagatgagcggggtgcggcagccgtcgggggtctcggcccaggcatagacgcaggcgctgtcctccaatgtgacggaaagggctacatcggaaaaggtctccccggaaaaggtccgccccgacaggccgggcagcagttcctgttcaaaggtgatggtgtcgtagttcaggtaatccccgaaatccacaatgcccatgcggcggtaggcggtgtcgaactgagcgcccagggattccggcacggtggcaaacagcagccgcccgccgtcctccacgtaattcatcaggcggccggcttcggacagttcctcctcccagtaggcggaggccaggatgaccatgtcatagtcggcatagctgacggtctgcgcccgggccaggtccagggaggtgccccggatgcgcagatgttccagggcgatggagacatttttttcgcaccctgccgaatcctcccgcccggggctgtacagtaccagcgcccggggcatggtatccccggtgatctccagcggttcggcggaggcagtctcctccagcgtgatcgaggcggatacggaacgcagggtcatgccctgcagggcagtgccgttgttgctgatgaggatcaccagggaaaaggccacgcacaggcagagcagcacggtaagttttttgcggttcttattcaatggactcctcttttctgaaagcccggacccaggccagcgtcctggtggtcagaaagaccgggcgggtgcgcaggctgtgcaggaatttctgcatgccggcgtagttcttctcctgcacgcagagggacagctggtcccggacagcctgctcgctgccggggtacagttccagataccgggcgcagagccgtcgggcattggcggggcggccctgccgcagttccaggcggatgcggtggtgcaggcagctttccggcgggcgggaggcgcgcagcatccggtcggtgagggcggtgtaacgggtcagcagacggcggcggacgtcggcgtcaaacaggtcggtctccagcacccggtacagcagttcctcccaggcggaacagacgtccgggtcccggggggacttccgccaggcggattccgccttgtccagctgctgctggaccttgcgccgcagttccatgatggccacgctggcatagtgggaggtctcgccgtcctcgttggacagcgcccgccgcagcgccggcaggtaaaccagagggtcctccacatccaaaagctgcatcaccgtccggcggcggtagccgcggtcggaaatttccagagcttcctccatggggacgcggtcggtctcggcggggatgtcgtggggctgcagccgggccaggtcctcggggcaaaactctccgccccggtaaaattcgctgtaatcttccggccgggcgctccgggcgcggcagtcgcagaaccacaaaagcagcggccccgcccccggcagggccaggcaaatcaccaggcacaatgcgcccttttgcaggctgtttgcctgccgggccatgagccaggcatacagcaggctgaaaaacaggtacagcccgcagaccagtacaaaaaaccagggcattacagcgccacctcctcgggacaggccgcgtccggctgcagttcgtccagggcgcggaccaggtcccgctcgatcagtcccaccaggactttgagcaggtcccggtaatgggtggtaaagcggtcgggttccaggtcataggccgccacgatgccgtacagccgcccgccgcagcggatggcagcggccaggtcgggccagttgggggtcaggtcggtgttggcgtagaccggcgttttggaaaagacggtgcacagggtatccagcttttggccgtccggcacggcgggggcgcggccggtcatggcgggggagcaggcggccagacgggcgctgcggccccccgggtccatgcggtagaccgacacatgatcgcattgcagcaggtcctccacaatgcccacggtgtgctgcaaaatctgctgggggtccagctcatccagttcctgcacgatgcggtacaggtcggcaaagctgtggcgctcggtcatgatgcgctgttggagccgggccttgatctccatgctctccccgtgcagggtctggagctgggcgcatttttcctccagcagatgatttttccggcgctgggcgtccaggtcgtcggcgcggcgtccggtcaggtaacccagggcggagccggtcacgccgtagatgacaaaggggatccaggtgtccacgctgtacagcaggtagctgatgtccacgtaggaggacgccaggctgtacaggtagctcaggcaggccagcgccactgccaccatgcccatgccgctgccgtagcagctggccgccagggccacgaacatcaggcggatgtccacatatttcaaatcggacacatccttggcaaagcgcagcaaaagcaccgtgaccccgaacaggaccagggtctcggccagctcccgccaggcccgggggagcgcccggcgggacaggcggggctttttggctgccttggggcggggtgcggcgggggcgtcgcggaggagctgccagccggtatcttccagcagggtgtagggcatccagcccgtggcggccttgatggaagcggcggaatactgaccggcgggcatggtgcggcggctgcccgaccactcgatcttggcggggcagcccgcggctttttccagacagcggaagtaatccttcaggggcaggggatgccccgtgaccagcaggtaacggccccggacattgtgcagcagcatccggtagaccgccgcggcggcgtcggcggcggtcagggcgtcgatgcagtcgccggggctgtacgggcagcggatggtctgcccggttcggacggcttccagggcggtgccggtaaagcccatgtccccgggggcggcccggtcataaatgtaccccatgcgcaggatgagcagcggcaggccgtcgtaatcccgggcggcctgacagcgcagctccccggcggccagggccgcctggcggggcgtgggcggcgtgtcccaggaaagctccaacgaggaaagatagacaaggcactggaccggatggtcatgtaaggcccggagcagttcatccagaaagtcggactgccggtcggggcaggcgtcggggccttcccgcagggggccggtcaggacaatgacggcgtcgatgtggtgggtgcgcaggatgggcagcatctgcgccgcggtgaaccggccccggcagaccatgcctttcagggatttgtcccacagcggccgctcccgctcctgtgtcagccagcagacgtcgtggccttcccgcaaaaagtgttccgcaatggctttgccggccagatcccacggccctgccaagagtatgttcataaggtgcgctccttttttcgcttcaatacggtgactggcgtaaagtcatatacactgtactgcctgtcggttgagaaatctgacgaaagaacggattttcaagatgtcgtattctgcggtcggcccggcaggccggggacgctccgacccatgccgcagaaccggctttggggcgatgccggtgtgcaaaccgcccccgaagttccagcatatgcggaaaaaaacaaaaaagacacgggatgcacaaaaggagccccgtgcttttggaatatttgaaaagcaaaccggcaaatcgcataaaagcgtcagaaaatcttcatgcggtttgtccattgacgcaaaacgcagggaggggtatgctgaatacagagaaaagaaagcgcttacaaaatcggcgcggagcctttcgggtaccgcggagcgacccttgggaggaggagatacggatgtcggtttccatttatgatgttgcagccgaagccggggtctccatcgccacggtatcccgcatcctgaacaaaagcgcggcggtcagccccaaaaaggtggcggctgtccaggcggccatggaaaagctccactttgaacccaaccagttcgcccggggcctggtgaacaagcaggccaatatgatcggggtctatatgctggacggggacgtctcggtgtttgattccacttacagtatcgagctgctcaagggcatccagcgggtgctgacctatcaggacaaatgcatgaccctgatcgtggagcggccgggctttcacaagcgggcagggggcatccccgcctaccgggaatatgtgcgcagcaagcgcatcgacgggctgatcctcaacggccccctgcgtgccatgatgccccccgaggtggagaaggaactgcgggagatggatttcccggtggtctatatcggccgtcaggaagaatccgagttcctcaacgtctacgcccattatgtggaatactgcctggagattttggaacatctgcgggcgaagggccacaccaacattgtctactacgcaatttccatgcatgagaattatatccggcaggtgaaatccgtcaccgatacctggcaggacggcaccaagatccgtttccgtttgctgcataccggcgagatgacccgggaacagtacaaaaaggacttgcagaaatacgtctgcgggggagaggtcaccgccgtttgcatgccggactacgaccaggccgtgaccatgctgggggtctgcaatgaattgaacatcccggtgccggaccggctgtccctggtggcggtcacccaccggatgaacgaggccaagcagacctatccgcctctgtccaccctgtatgtccccgccgtggatatgggggccagcgctgcggaactgctgctgcaccgcctgaacggggatgatatccccgagacgggcattgaatataaaccacgctataccgagcgggagtcggtcaaggatatgaccgccccggcgacgccttgaaagaaaggcgtctctttttgaaagaaaaatgtaagcgctttcataaactttcagggttttgaaacaacgtgtaacagttgaatttttgtttcatggcaagagcaaaagcgctgaaaacggaggtgataccaaggcccgagggaaaggggaaagagcacgacaaacgcgtgatcatcacagcacaaagcgcggcagaccaaagaaagcagggcatctgcaaaaaatataaagcagcctccatggctgcaccggggcagagcggcttgcttcccgcaggaaagcgcgcggaaaaaacggagtgacaagcaatgaaatgtatcatggtcatgtacgattctctggtccgggacctgctgcaatcgtacggatgcgactggaccaagacccccaactttcagcgtctggcccagcgcagcgtgcagtttgaaaactgctatgtgggcagcatgccctgcatgccggcccgccgggaactgcacaccggtcggctgaatttcttccaccgcagctggggacccatggagccttttgacgactccatgcccgaactgctgaaaaaggcgggcatttacacccatctggtcagcgaccaccagcactactgggaggatggcggctgtacctaccacaaccgctattcctcctgggagatctcccgcgggcaggaaggcgacaactggaaggcggatctgagctacaagtacgacaaaaagacggtgttcaaaaataaggagatcatgctctcctacccgccgtacaccaatatgctcagtcatgacgaggtcaaccgccatgccatggacaccgaggaaaagacctcccaggctgtgaccttccgctatggcatcgagtttttggaccgcaaccatgcccaggacaactggttcttgcagatcgagacctttgacccccacgagccgttctacactctgcccgccgacaaggaactgtatccccacaccttcctgggtgacgcggccgccgaggccgactggccgccctatgctccggtggcggaggaccagaacaccatcgaccatgtgcggtatcattacgcggctctggtgagcaagtgcgaccgctatctgggcaaggtgctggacaagatggatgagtataacctgtgggaggacaccatgctcatcgtcaacaccgaccacggcttcctgctgggcgagcatggctggtggggcaagaccgccatgccgctgtacaccgagatctcccacacgccgctgtacatctacgatccccgccgcaaagaactggcgggagcacaccgcaatgccctggtgcagaccatcgacctggcacccaccattctggaattcttcggccagcccatcccggcggacatgcagggcaagccccttaccggcgtgatggacagcgacgagcccatccgcaaatatgcggtgttcggttaccacggcagccaggtggatgtgaccgacggccgctacctgtacatgcactccgccgagcatcccgacgccgatgtctatgagtacaccctcatgcccacccatatgcgggccatgttctctcccaaggaactgcaggagaccgaaatggtgaaaccgttctccttcaccaagggctgcccggtcatgaagatcaaagcggtgaaccgcatgggagacaccacctctttcggctccatgctgttcgatctggaaaacgaccccgcgcaggcccatcccctggacgaccctgagaccattgcccggatgaaaggctatatccgggaatgcatggaagaaaacgacgccccggctgaactgtatgaccggcttggcgtataatcaaaggcgcaccgccttttgaattttcaaggaggataccatcgtgcaacagacttacaaaaaagcatcctttgcggatatcgtcaaatattcctttggcggcatcggttccaacatggcgtttttcctggtcatgagctacctgaccttcttctacaccgatatttttggcatcgacaccatggtggtgtcggtcctgatgctggtctcccgtttcatcgatgcgttcaccgaccccctcatgggtatgatcggtgaccacaccgtcagcaagatgggccgtttccgtccctggatcattttcggcgccccggtgctgggcgtgctgatcttcctgctgttcaccgcgccggatctcagccccaccatgaagatcgtctacgcctacgtggtctatatcgcctactctctggcgtccaccgtggtcaacatcccctaccatgccctgaccgccgtcatgtccgatgacccccagcagcgcaccaccatcgttacctggaaacagggcatgagcgtcattcctcagttcgtcgtcaccgtcatggccatccccatggtggacttcttcggcggcggcgccaccggctgggccatctacggcgctttcattgccatcgtcaccaccgtgtccttctggatctgcgcctggggcggcaaaaaatacgatgtctgcgatgaaaagaccatccgccaggccaagcagaaaaataacttcaactttgcccgcgatatgaagctgctcatcaagaacaagcccatgatgatgctcatgatcgctttcggcaccgacgttctggccaacgccacctgcagcgccgtcaacgtctactacttcaagtacgtcattcaggatatgtccctggtggctcaggtcgccaacgttaccctgtggaccggcatcattgccatccccatgctgcccatcctgaccaagtggctgggcaagcgccgcctgttctggtggggcgaagccatctccatcatcccgctggccgttctgtggctggtccccaacccctccgtcaatctgatcatgatgatgagcatgttcggtttctggggctttatctccaagttccccagcttcctgggctgggccatgctgccggaatgctccgactttgccgagtggaagttcggccagcgtgccgacggcctgatgtcctcctccctgaccttcatcaacaagttcggcatggccatcggcggcttcattgccagcttcttcctgggtctggtgggctttgttcccgacgtggagcagaccgcagccgtttgcagcatgatctccttcctgcgcttcggcgtgcccatcctgggctatgtggcgtccctgatctccatgtggttctatgagatcaccgaggacaagtacaaggagatccgtcaggatctggatgcccgtcacgcacaggcagaaaaaggtgtataataaaccatgacaatatcccggcgcggtgggggacgggcatcccgcccgtcccgccgcggcccgcgggaatccatcccatgaaaaggagtcgcattatgaaaagaaccatccgacagatgcctctgcccggcacgcccgacccggcgccccaggcatgggaggcagagcacgcggcgctggcccgcagggcggcagccgaaggttttgtcctgctgaaaaatgaggacggcgtcctgcccctgacccccggcagcgcggtggcgctgtacggtgcgggtgcggtacataccgtcaaaggcggcaccggttccggcgatgtgaacgagcgccacagcgtcaccgtgcgggaaggcatggaggctgccgggttcaacatccgcagcgccgcatggctggatgcctatgaggaagtctatgccaaagcccgcgccgactggaagcaggccgtgctggacaagtgcggcggcagcaccaaaaacggcatggaattctttatggcgtattccaccacgccgttcagcctgcccgcaggccccgccgtcaccccctgcgatgccgacaccgccgtctatgtgctggcccgcatcgccggcgagggcagcgaccgcaatgcaggcccgggcgactactgcctgagcgatgaggaacacgccatgttggcagacatctgccggatgtacaaaaacgtggtggtgctcatcaacgcgggcggcgtggtggacctgtccttcctggatgaatttgcaaacatcaaggccctgctggtcatctcccagccgggcatggagggcggcaatgccgtggccgatgtgctgacgggcaaagtcaccccctgcggcaagctcaccgacagctgggcggtgcattacgccgactaccccaacgcggcgaccttctcccacaacaacggcaacgtctcccaggaatattacgaggaaggcctgtatgtgggctaccggtattttgataccttcggcgtgccggtgcgctacggcttcggcgagggcggctcctacaccacctttgccatggaagcgggacagctgcacaccgcccccgacggcagcgtgaccctggacgtgacggtcaccaacaccggggcctgccccggccgggaagtggcccaggtctatgtggctctgcctcagggccgcctggaaaaggagttccgccggctgtgcgcctttgccaagaccccgctgctccagccgggggagagcacgacgctgacgctgaacttcggcgcggaggaactggcctcctacgatgaggagcagagcgcctggctgctggaagcgggggactacggcgtctacgcgggcgcatccctggcggcggccaagcctgtggcaaagctgcatctggacggggacaaggtgctggaaaagacctgcaccatctgcccgctgaaagaggaattgaacctgctgcactgctctgcggagcagcagcaaaagaaccaggcccgggcggcgcaggactttgccgcccttccggcagcggcctatgacctgtcggcggtggagacccgggtggtggattacgctgaccccgcccccctgggtgacgaggccgaggccatcgtggacacgctggagaccgagcagctggtggccctggctaccggcgaccctgccaagggccagggcgcgctgggtgcggcaggcgtttcggtgccgggttccgccggtgagaccagctcctgcgctctggaacaaggtgtggccaacatcgttctggcagacggccccgcaggcctgcgcctgaaccagacctactatgcccgggatggcctggccatggccatgcccatggaggcaagcctggagcacggcctgttcatggaggacaccgcgccccagggcacgccgcagtaccagttctgcaccgccttcccggtgggaacgctgctggcccagagctgggacaccgacctgctcaaagaggtgggccgcaccgtgggcgaggagatggaccgctttggcgtgaccctgtggctggcccccggcatgaacctccaccgcaaccctctgtgcgggcgcaactttgaatactatgccgaggaccccttcctcagcggcaagatggccgccgccatgaccctgggcgtacagagcattcccggctgcggcaccaccatcaagcatttcgcctgcaacaaccaggaggacaaccgcttccactccaacagcatcctgcccgagcgggtgctgcgggaactgtacctgcggggtttcggcatcgccgtgcgggagtcgtctccgctgtccatcatgaccagctataacctcatcaacggggtccacgcggccaacaactatgacctgtgcaccaaagtggcccggtgggagttcggatttgccggtttcttcatgaccgactggaccaccacctgccagggccccgactgcaccgccgacggctgcatccgtgcgggcaacgacgtggtcatgcccggttttgagagcgaccgcgaccagatccgcaatgccctggccgatggtaccctgtccctggcggaactgcggggctgcatcacccgtctggtgcgggtgatcctgcagtccagccgttatactgccgactgatccggcccggaattccggcagaaaacaacatcagaccgcataccctaacccccggcacggctcctgcgtatggtcccgtgtcggggctttttatgcgttttttggacgttcgtttgctctggcggtggtgcggcggcacggcaccgaaaaaacgattttgtgcagggtctctaaaaaatgccggtgcaaacaaggcataacgctaaaaagcaaggggagggattgacaaccattgtgaagtcggctacactcaaaacaattcaacgagataaagcgctgaattgcaaaccgatgacgcagagaagtacgcaggagtcgtttttccccaagagagccgcgggcaggtgagagcgcggcggaaaaaaccttgccgaatggactgccgagggcgggccgaacgggtttccccagtaggtaccgacgggtttcccccgttacagggaacggtgtgtgttggcacatcgatagagcgggcgaggcatcccctcgtcaatttgggtggcaccgcagaagtcgcaaggcttttgtcccaaagggtattttttacacatgccctgtgggacaaaggcctttttgttttggtcccgcacggcgcacagaaaggagccgaaatcatggccgcacaaaacatcccctacaaaatttacctgtccgaagaagaaatgccccgcacctggtacaacgtccgcgcggacatgaaaaacaagcccgccccgctgctcaacccggccaccggccagcccatgggatatgaggacctgcgccccgttttctgtgatgagctcatccgccaggagctggacgacaccacccgggagatccccatccccgacgagatccgggacttttacaagatgtaccgcccctccccgctggttcgggcctactgcctggagaaaaaactgggcacccccgccaagatctactataaattcgagggcaacaacacctccggcagccacaagctcaacagcgccatcgcccaggcctactacgccaaacagcagggcctgaagggcgtcaccaccgagacgggggccggccagtggggcaccgccctgtccatggcctgtgcctatctgggcctggactgcaaggtctatatggtcaagtgctcctatgagcagaagcctttccgccgggaggtcatgcgcacctacggcgcgtcggtgacgccctccccctccaccgagaccgaggtgggccgccgcatcctggccgagcatcccggcaccaccggttccctgggctgcgccatcagcgaggcggtggaaaaggccacccggacccccggctaccgctatgtgctgggcagcgtcctgaatcaggtgctgctgcaccagagcgtcatcggtctggaagccaagaccgccctggacaaatacggggtggtgcctgacatcatcatcggctgtgcgggcggcggcagcaaccttggcggcctgatctctcccttcatgggccagaaactccggggcgagcaggattatcgcttcatcgcggtggagccggcctcctgccccagcttcacccggggaaagtttgcctacgatttctgcgacaccggcatggtctgccccctggcaaaaatgtacaccctgggcagcaacttcatcccctcggccaaccacgcgggcggcctgcgctaccacggcatgagctcggtgctctcccagctttaccacgacggcatgatggaagccgtggccgtggagcagaccaaggtctttgaggcggcggaggagttcgcccgggtggagggcatcctgcccgcccccgagagcagccacgccatccgggtggccatcgacgaggccctgcgctgcaaggagaccggggaggaaaagaccatccttttcggcctgacgggcaccggttacttcgacatggtggcctacgaaaagttccacgacggcaagatgaccgataccatccccaccgacgaggaactggccgccagttttgcccgcctgccccaggtcccgggccaggactgatttttccacagccctcccgaaagcgattgacgggacgggggcaaaggtctataatgagttcacaacaaaataagcaggggagctcgtgttgacgggctgagaggaaggaaccaccttcgacccttacacctgatgcggataatgccgccgtaggaagtcgtggaatcatcagctttttccgggaggcaccgcttgtggtgcctcctgtttttttgtgcctttgggaagggagagtgaaagcggaacttccgcgagttttcgcggcgggcagagggggagcgccctgtgccttgtatgcagtatgcagcgatgggaagccgtgttccggcgtgagaggaggccagcaagcctcgaccgacttttgtaccccgcgcccgggcaggattctgtccagcccaccggggacccgaaatcttttggggaaagtgcgctgcatccaccgctttcccgcatatccaaccgaaaggaagtcttaacaatgaaacgtaccaatgttcaaaaacttgccctggccggtctgctctgcgctgtcgccgtggtgggcagcatgttctccttccccatgttcggcagcaagtgcgcccccatccagcacatggtcaacatcctgtgcgctgtcctgctgggacccggctacggcgtgggcgtggcttttgccgccagcctgatccgcaacctcaccggcctgggcaccctgatggctttccccggcagcatggtgggcgccctgctctgcggtctggcctaccggtttacccgcaacctgcccctgaccctggtgggtgaggtcttcggtactgccgtgctgggcggcttgtccgcctacccggtggctattttcctcatggggcagagcaccgcggacattgcgttttacgcctacatcgtgccgttcctcgtctccaccgccacaggcgcggtgctgtccggcattctggtctacgccctcaaaggcaccggcgctctgggctccatgcagaagaaactggcaagataaccaatacgtaaaaggaaactttgtatgtttgcaccatatctcgagaaccttcaccggcaaaagccgctgattcatgccatctccaactatgtcaccgccaacgactgcgccaacatcctgctggcctgcggggcgtctcccattatggcagacgaccccggcgagtccgccgagatcaccgccctgtgtcagggtctggccgtcaacatcggcaccctgcaccagaacaccgtcccggccatgatcgcgtcgggacgggccgccaatgccaagggcatcccggcggtgctggacccggtgggggcgggagcgtcgaaactgcgcaccgccaccgctttgcagctgctgcgggaggggcattttgacgtgatccggggcaacctgtcggagatcaagaccctggctctgggcagcggagccacccacggggtggacgccgacccgggggatgccgtcaccggggagaccctggacgccgccgcggcgtttctcaaagcctttgcggccaggaccggcgcggtggtagcggtgacggggaacatcgacattgtggccgacggccgcaccgcctattgcatctataatggccatcccatgatgggtcgcgtcacggggacgggctgccagctcacctgcctgacggcggcctttgcggcggccaatcccggcgacctgacgggggcggcggccgcggcggtgtgcgccatgggcctttgcggggaacttgcccaccggcggctggacccgcaggacggcaatgcaagctaccggaactacatcattgacgcggtgtatcgtctcacacccgaacaactggaggagggcgcccgatatgaagtgcgataaacagaccatgcggctctatgccgtgacagaccgtgcctgggtggggcagcagaccctgtatgagcaggtggaggccgccctgcaagggggcgtgacctgcgtgcagctgcgggaaaaacagctggaccgtgacgcttttctggccgaggctcgggacatccgggacctctgccgccggtacggcgtgcccttcatcatcaacgacgatctggacattgccgtggcctgcggggcggacggcgtccatgtgggccaggacgacatgccggtggaggaagtccgccgccgggtgggggacgcaatgatcgtcggcgtctcggcccataacgtggaggaagccctccgcgcccaggcgggtggagcggactacctgggggcgggggccgtcttcggcaccagcaccaaaaacaacgtgacaccactctcctttgacaccctgcgggacatctgcggggcggtggacatcccggtggtcgccatcggcggcatcggggcaaagaacatcccgctgctgcgcggcagcggggtggacggcgtggccgtcgtgtccgccatcttctcggcgccggatatcacatccgcctgccgggaactgcgcgccctctccgaccggatgaccggcacggaagaataacagaccgacaggttttccacgcccttgtggaaaacttcggcgcggcagaccgggggcaccactctctgtcgcgatagaaaagatcaatgcggaaggcgcgagtgacataagaaaacattagaattttgcgactttgttttcttaatggaaccgcgcggaaaggaaggttttccatgaaaacagcattatccatcgctgggagcgattccagcggaggcgccgggattcaggccgatctcaaaaccatgacgatgaacggcgtctttgccatgaccgccatcaccgccctgacggcccagaacaccaccggcgtccaggcaatccaggaggccacccccgatttcctgcggcagcagctggattcggtctttaccgatatccggcccgatgccgtcaagatcggcatggtgtcctccccggagctcatctcggtcattgccgaccggctgcgcttttacggcgcagaaaacattgtggtggaccccgtcatggtggctaccagcggcgcacggctcatccggccggaggcggtggagactttgaccagggagcttctgcccctggccatcgttgctacccccaacatcccggaagctgaactgctggccggctgcaccatcgacagccccgccgccatggaaacggccgcccaggccatccatgaccgctacggctgcgcggtgctgctgaaaggcggccaccgggtcaacgacgccaacgatctgctttgctgggacgcggggctccagtggtttgagggcaagcgcatcgacaaccccaacacccacggcaccggctgcaccctgtccagcgccattgccgccaacctggccaagggctaccccctggccgtggcggtgggccgggccaaggagtacctgaccggggcgttgtccgccatgctggacctgggcaagggcagcggccccatgaaccacgcctgggacctgcggggcgagtttgccaaagaagcggaatgaatcggaaggaatcccaaacaaaggagagcaaaaccatgagcgaacggaactatgccacccagatggaggcggcgcgcaagggcatcgtgaccccggaactggagatcgttgccaaaaaggaacggatgacggtggaggaactgctgcctctggtggcgtcgggcaaggtggtcatcccggccaacaagctgcacacctgcctggaccccgagggtgtgggctccatgctgcgcaccaagatcaacgtcaacctgggtgtctcccgggactgcaaggactacgacgtggagatgcagaaggtcatggccgccgttaaaatgggcggcgaggccatcatggacctgtccagccacggcaacacccagcccttccgccagaaactcacccgggaatgccccgccatgatcggcactgtgccggtgtatgacagtgtcatccactaccagcgggacctggacaccctgactgccaaagattttattgacgtggtgcggctgcacgcccaggacggcgtggactttgtgacgctgcactgcggtatcacccgcaagaccatcgaccagattcgcaagcacaagcgcaagatgaacattgtctcccggggcggctccctggtctttgcctggatgtgcatgaccggccaggaaaaccccttctatgaatactacgacgagattctggacatctgccgggagtatgacgtgaccatttccctgggagatgcctgccgccccggctgcctggccgacgccaccgacgtctgccagatcgaggagctggtccgtttgggcgagctgaccaagcgcgcctgggaaaaggacgtccaggtcatggtggaaggtcccggccatgtgcccatggaccagatcgccgccaacatgaaagtccagcagaccatctgccagggtgcgcccttctatgtgctgggacccctggtcaccgacatcgcccccggctacgaccacatcaccgcggccatcggcggggccatcgccgccatgaatggcgcggccttcctctgctatgtcaccccagcggagcatctggccctgcccaacctggatgacgtgaaacagggcatcatcgccagcaagatcgccgcccacgccgccgacatcgccaagggtgtccggggcgcccgggaaatcgacgataaaatgggcgacgcccgccgcgctctcgactgggaagcccaatgggcctgtgccctcgaccccgagaccgccaaggccatccgggccgaccgctcccccgagcatgacgatacctgctccatgtgcggcaagttctgcgccgtgcgcagcatgaacaaggcactcagcggcgagcacatcgacattctgtgacccgcccggcctgcaatttgcttccataaatccggcgccctccctccggcagcctctgcccggggagggcatttctttttcggaagttgtacacccgggccaaactgtccaagacctcgtaaaactctgttaacaaacatttcccccggccgtgggataataaaaaagaaaaaatgccgcgccgggaccggagtctctccgaccggctgcgtaaaccgcatatgacaggaggatttcctatggaaaattcgcttttgtatcccgtaaactcggcatcccggcgggcagtcagcctggacggtatgtggaagttccgcttcgaccacgagggcgcaggccttgccgcaggctggaccaaggccctgcctgacccggtgtccatgccggtgccgtcctccttctgtgacctgttcaccgacaaggacagccgggaatactgcggcgacttctggtacgagaccgatttctttgtccccggggagtggcagggcagcgacgtggtcctgcgcttcggctcggtgacccaccgcgcccgggtctttgtcaacggggtggaggtggcctcccatgagggcggcttcctgcctttcaacgccgacgtcaccgacgtggtgcgctacaacgcccagaaccggctgaccgtcctgggcaacaacgagctgtacgagtacacgctgcccgccggccggaccgcggtgctgaaaaacggcaaaaaggtcgccgcgccctactttgacttttacaattacgcgggcatccagcgcccggtgaaattgctgtgcctgcccaaggagcgcatcacggacttttccgtcaatcaccggctctgcggggcggacgcccaggtggactacaccgtcaccaccaacggcggcagcggctgcacggtggaagtctacgacgccgacggccgcaaggtggcggccgggaccggcaaggcaggcacgctgcatatcagcaatgcccacctttgggacgttcacgccgcctacctctatacttttgtagtgcgcattgtggacggcgacaaggtggtggacgagtacagcgaccgcatcggcatccgcacctttgaagtgaagaacgggcatttcctgctcaacggcaagcccatctatctcaagggcttcggcaagcacgaggacgccgacctgcggggccgtggcctggatctggtcaccgtcaagcgggactttgaatgcatgaagtggatcggcgccaactgcttccgcaccagccactatccctacgctgaggaagtctaccaactggccgacgaggagggcttcctcatcatcgacgaggtcccggcggtgggctttatggaaagcctgatgaactttgtggcggccagccagggcaacggcaagcaggtgggatattttgagaaggagaccacccccaaattgctggaaaaccacaagcaggccctgaccgagatgatcgcccgggacaaaaaccatgcctcggtcattgcctggagcatcctcaacgagccccagtgcaccagcgagggcaccgaggcctacttcaagccgctgtttgacctggcccatgcgctggacccccagaagcgcccccgcacctatgccatcatcatgatgagcggccccgacaccagcaaaggccagcagtttgccgatttcatcagccttaaccgctactacggctggtacgtcatgggcggcaacggcatctccgacgccgaggatgccttccgcaccgagatggacaagtgggcccaggtccgcggcgaccgtcccgtcatcttcaccgagtacggcgccgataccctggccgaggaacacaagctgcccagcgtcatgtggagccaggaataccagaacgaatatctggacatgaaccaccgcgtctttgacagctatgattttgttcagggcgaactggtctggaactttgccgacttccagaccaccgagggcatcatgcgggtgaacggcaacaaaaagggcatcttcacccgccagcgccagcccaaggacgcggcgtataccttccgcgcccgctggaccgccctgccccgggactataagggctgacagaagctcggcatccgggtccggcggcggaaggggaaaatcgtttctttcatggagccgggacccgcactgcgggcaggattttgcggcgttgtttagcagcaaagccgcgcggaacggggaggattttgcctttcggtcaaaaagtggaattgcatggcgtttttctgtgtgatatactggattcagtgtgtatcaaaccgtccggcggcggggaccggccgtgccgcggggcggaattctggaggaaagtgggacgcagatgaacataggatttgacaataataagtacctggccatgcagtcggcgcatatccgtgagcgcattgcccagtttgacaacaagctgtacatggaattcggcggcaaattgttcgacgattaccatgcttcccgtgtgctgccgggcttccagcccgactccaagctgcatatgctgcttcagctcaaggatcaggcggagatcgtcatcgccatcagtgccgaggccatcatcagcaacaaaaagcgcggcgactacggcatcacctacgacatggacgtgctgcgcctcatcgatgcgttccagggtgtcgggctgtttgtgggcagcgtctgcatcaccatgtacagccccgagccagaggtcattgcctttgagcagaagctccagaccctgggcatccgcagcttccgccattacaagatcgcgggctatcccggcgatgtggcccgcatcgtcagcgacgagggctacggcaaaaacgagtacatcgagacccagcgccccctgatcgtcgtcacggcccccggccccggcagcggcaagatggccgtctgcctgtcccagctctaccatgagtacaagcggggcgtcaaggcgggctatgccaagtttgagaccttccccatctggaacctgcccctcaagcatccggtcaacctggcctacgaggcagccaccgccgacctcaacgacgtcaacatgatcgaccccttccatctggaagcctacggcgaaactgccgtcaactataaccgcgacatcgagatcttcccggtgctcaacgccatgtttgaactcattgccggcaagagcccctaccgctctcccaccgacatgggcgtcaacatggcgggcaactgcatcgtggacgacgaagtctgccgcgaagcctccctcaaggagatcctgcgccggtacatgaagtgcctctgcgaccagaaggtgggcggcaccgtcaaggatgaacgcttcaagctggaactgctgctcaatcaggccggcctgaccgtgggcagccgcgccgtggaacagcaggcccatgcccgctccgaaaagaccggcggtctgcctgcggcagccatcgaactgcccgacggcaccatcgtcaccggcaagaccggccccctgctgggcgcggcctcgtcggcgctgctcaacgccctgaaaaagctggcgggcatcgatcaggagatcgagctggtctccgcccgcgccattgagcccatccagaacctcaagaccacctatttcggcagcaagaacccccgcctgcacaccgatgagatcctcatcgctctgtccagctccattgcggagaacaagtatgccgaggcggcgctgaatcagctgcccaacctcaagggctgcgatatgcactccacggtcatcctctcccgcgtggacagcgagaccctgaactgcctgggcatctatgtcacctgcgatcccgtgtatgaggaagaggaccgcaagtaccacaaatcctgaaccaccagaacccttcaagaggtccggcctgaaatgccggatctctttttttgcgcttctctttccttatatataaaggaaggagaaaaatgcagccgggctgtgggcgagaattgccccagaaatagtgtgtcaaaagcgtgaaaaccaccacatacgggtagggtaaaaaccgggtaaaaaaatctcgaaaaaaatcgaaaaaaggtgttgacattcgggttttcgtgtagtattataactaagctgtcccgcgaggcaaccggtcagaacgaccggaactcaaaaaaatctcaaaaaagtgcttgacaaacaaaacttgatgagatataataaacgagttgctccgcgagagcggacggcacaggaccttgaaaattgaacaatactgaaacttgtggaaccttgaacgtgtttggaaagaacacgataaacaattccaaaaacaagtaattcgacaggacgcaagcgattgtgtctgagaaattacagagatttaacactttgtaagtgattaaataccatttataaagagtttgatcctggctcaggacgaacgctggcggcgcgcctaacacatgcaagtcgaacggagcttttnttccaaaaacaagtaattcgacaggacgcaagcgattgtgtctgagaaattacagagatttaacactttgtaagtgattaaataccatttataaagagtttgatcctggctcaggacgaacgctggcggcgcgcctaacacatgcaagtcgaacggagcttttcggagcttgctttgaaaagcttagtggcgaacgggtgagtaacgcgtgagtaacctgccctcgagtgggggacaacagttggaaacgactgctaataccgcataagaccacagagccgcatggctcagngagcttgctttgaaaagcttagtggcgaacgggtgagtaacgcgtgagtaacctgccctcgagtgggggacaacagttggaaacgactgctaataccgcataagaccacagagccgcatggctcagaggtaaaaggatttattcgcttgaggatggactcgcgtccaattagctagttggtgaggtaacggcccaccaaggcgacgattggtagccggactgagaggttgatcggccacattgggactgagacacggcccagactcctacgggaggcagca

SEQ ID NO: 37 - DNA, 280680 bp, Gemmiger sp.
  source 1..280680: mol_type = genomic DNA
tcccgcgccgtcaaccgcctgctgaatcaggagatccgctgcgccgtggcccggggcatgacggtgctctactgcatcggtgaaaagagcgaggaacaggacaactgggagcaggttttgggcgagcagctgtccatcggcctggaaggcgtggacaagtccaaggtcgtcatcgcctacgagcccgtgtggtccatcggccccggcaagaccccggccgacaagccctacatcaccaagatcgcccgcttcgtcaaggagcagaccggcggcatggacgtggtctacggcggcggcctgaaatctgacaacgccgccatgctggcctccatccccgagatcgacggcggccttatcgccctcacccgctttgccggtgagatcggcttctaccccgaggaatatctggagatcatccgcctgtatctgggcaaataaatccgccctaccacaccgtaaaacaacaaaggagcgttatcatgaagcattttgagtttgagtntccaccgacgaattcatccccggcatcacggttcccgacccggactatatccccgaggacaagctggaagccgcttaccgtgagagcctggaccatcccatcggcatgcccaccgtcaaggagctggcccacaagggcagcaaggtggttttcgtcgtgcctgaccgcgtcaagggcggcgagcagcccaccagccaccgcaagctgtccatcaagtacatcctggaggacctgtacagtgtcggcgtggagaagaaggacatcctcttcatcatctccaacggcctgcatccccgttccaccgacaaggacgctctggccatcttcggacccgagctgtacaaccagttctggcccaccggtcagatcatcagccacgactccgaggacccggacaacatggtggacctgggcttcaccaagcgcggcgaccccgtgtggatgaaccgcatggtctttgaagccgacctgcccatcctcatcggccacgtcaacggcaacccctacggcggctactccggcggctacaagcacagcgccaccggcatcaccaactggaagagcatcgccagccaccatgtaccctccgtcatgcaccgtgacgacttcacccccgtcaacggcggcagcctgatgcgggacaagttcaacgagatctccatgcacatggaggagaagatgggccatcccttcttctgctgcgacgccgtcctcgactccaagagccgtcagatcgccatcttctccggctacgccaaggaaatgatgcccgagagctggaaggtcgccgacaagcgcacctacgtccactgggccgagaagaagtacgacgtcctcgtctttggcatgccccagaagttccactacggcgacggcatgggcaccaaccccatcatgatgatgcaggccctgtccgcccaggtgctgcgcttcaagcgcgtcatgagcgaccactgcgtcatcatctgctcctctctgtgcaacggcttcttcaacgatcacaagtggccctacctgcgtgagtgctacgagtggttccagcatgaccagatgaaccagctgcccgacatgaaccgtctgggcgagtactttgccaccaacgaggagtacatccgcaagtaccgcttcaccaacgctttccatcccttccacggcttctccatgatgagctgcggccacatcgccgagatgaacaccagcgccatctacattgtcggcgccgaggacccgggctatgcccgcggcatgggcctcaagacccgcgccaccttcgaggaggccctggaggacgccaagaagaagtatgtgggcgagaaccccaacatcctggctctgcccctgaccttcaagaccaccagcgtccatctgtgcatgaagaaccccgccgacgactgcatggacgagtacggccatcgccacggcggctgcggctgcggctgaaaggaggccgcccatggccggtaatcttctcatcgtgcatggcggcggccctaccgccgtcatcaactcctccctgtacggggccatccgtcaggcccaggagtctccgctggtggaccgggtgtatgcggccatcggcggcaccggcggcctgctgaatgaaaagctgcgggacgtcaccgacattcccgacgcggaactccgcgggctgctgtccagcccggcgtccgccatcggcaccagccgggacgccctggaagcccccgagtatgaggccatggtgcccattctcgagaaatacggcatccgttacgtcctgatgaacggcggcaacggcaccatggatacctgcggcaagctgtatgcccgctgcgcccagcggggcatcaacgtcatcggcatccccaagaccatggacaacgacctggccatcaccgaccactcgccgggcttcggcagtgcggcgcggtacatggcgggcagcgtggcggaggtctgctgcgacgtggagggcttgcccatccacattgtggtggtggaagccctgggccgcaacgcgggctgggtcacggcggcggcatcccttgccaccgacagctatgcccacggccccgacctgatctacctgcccgagcgggctttcaaggaggaagaattcctctgcgacgtggagcagctcattaaaaccaaaggccatggtgtggtggtggccagcgagggcctgcactatgccgacggcacccccattgtggagcctatcttcacggtgggccgggccacctattttggcgatgtgtccgcccatctggcgaacctcatcaccaaaaagctgggctacaaggcccgtgcggaaaaaccgggcatcctgggccgggcgtccatcgcctggcagagcgagaccgaccgcaccgaggccgaactctgcggccgtgcggcggtagatgccgtcaccaccggccagagcggcaaaatggttgccctgcgccgcgtcccggggcccaactaccgctgcgagaccttcctcgtggacatccaggaggtcatgatgaccgagcgcaagatgcccgacgagttcatcaacgcccgcggcaacaacatcaccgacgctttcaaggaatggtgccgcccgcttatcggcgagcccctgcccaagcttatggatctaagaccctgacaaacccaaaagggaagtgactattatgttgaaactcagtatccgcgatcagcgcgcactcgtgggtgaggccgagctgacggccgccatccagaacggcgtgcctgccctccagctggcccaggccggcgaggaacgttattccgacagccagggctggctgcatgtggacgagtgggctaacgaggatgtcctgtccaccatcgagcgcattgccgcccacatccgcgagacctgcgacgcttttgtgctcatcggtgtcggtggctccaacaacgccgcccgtgccgtcattgaggcattggcagacggcaccggtccccagatcgtctacgcgggcaacaccctgtccgccaacgccatgaaccgcatgctcaagcagctggaaggcaagcgctttgccatcgactgcattgccaagaactttgagacgctggaaccgggcgcatccttccgcgtcctgcgccgggaactggctgcccgctattcccccgaggaagccgccagccgcatcatctgcaccggcacctacggctcttctctggaagagctgtgcaagaccgagggctacaccttcgtgcccttccccactaacgtgggcggccgctacaccgccatgacctacgtgggcctgctgcccatggccgtggccggcattgacatccgggctttggtccgtggcgctgccgacatggagaccactctgcacaccggcgtgccggaggacaacctggccctgcgctacgccgtgctgcgcaacctgtactatcagcgcggctacaagctggaactgctggccagctttgagccccagttccgctggttctacaaatggtgggtccagctcttcgccgagagcgagggcaaggacggcaagggcctgttccctgtcaccgccgaatattccgaggaactgcacgccgtgggccagtacatccaggacggcgctcccctgatgttcgagaccttcctggacgtggaatcccgccaggacagcctggtggtcatgcccgacggcaaggccgactacttcgattacctcaacggcaaggacttctatgacatcaacaaggcggcgttctccgccaccgtcaccgcccacagcgagaagctgccctgcctgatcttcgacatccccgcgctggacgcctacaacttcggccagctgttctacttcttccagtttgcctgctacatctccggcagcctgctgggcatcgaccccttcaatcagccgggtgtcgaagcctacaagggctggatgttcaaggccctgggcaagtaatttcttctgctctctccttttttgtccatatctcaaatgcgggaaggccccgcggcatacgccgcggggccttcccgtttatatctgtcccatcgcccacgcaaaatacagtacggcattttttgcacaaatatgccacgctgtatttattttacaaaatcacgtaccgtgtcagtccgcccagtccctggcccggctgacggccttgcgccagcccgcgtacaggcggtcccgctcctccgcgtccatggcgggagtgtagatcttgtccagcgtccactggctgcggatctcgtccaggtctttccagacgccggtggcaagcccggccagataggcagcgccaagggcggtggtctcccggatcatggggcggcggatgctgcgccccacaatgtccgcctggaactgcatgaggaagttgttggcagaagcgccgccgtccacccgcagttccttgagggggattccggtgtcctcctccatggcgtggagcacgtccccggtctggtaggcgatggattccagcgccgcccggatgatgtggttgcgcccggcgccccgggtcaggcccaggatcgctccccgggcgtacatatcccagtagggcgcccccagcccggtaaaggccggcaccacatagaccccggcactgttgcgtactttctgggcaaagtattcagtgtcggaagcttcggtgatgagatgcagttcatcccgcagccactggaccacggcgccgcccacaaagacgctgccctccagagcgtaggtcaccttgccgccgatgcccgccgcaatggtggtgagcagaccgtttttgctcacaaacatctcgctgccggtgttcatgagcaggaagcagccggtgccgtaggtgtttttggcctctcccggctcaaagcaggtctggccgaacagtgccgcctgctggtccccggcaatgcccgcaattggcacctccacgccctgaatgttgacggtgccgtacacctcgctgcagctgcggacttcgggcagcatgttcatggggatgcccagccgctcacagatatgcttgtcccagcaaaggtttttgatgtcgtacagcatggtacggctggcgttggtgtagtcggtcacatggaccttgccgccggtgagcttccagatcagccaggtgtccaccgtaccgaacagcagctgccccgcatgggctttttcccgggcgccggggacgttgtccaggatccagcggatcttggtggcggaaaaataggcgtcgatcaaaaggccggtgtgttccttgacataggcggtaaactcgccatccttcatcagttcctcgcagaagggcgcggtgcggcggcactgccagacgatggcattgtagacggggcggccggtctccttatcccagacgatggccgtttcccgctggttggtgatgccgatgcccgcaatgtcccggacatcgatgccgctctgggccagcacctccatgagcacgccgtactggctggaatagatctccatggggtcatgctccacccaaccggggtggggatagtgctgggtgaactccttctgcgccagctgaacgatgttctgtccccggtcgaacaggatacaccggctgctggtggtcccctggtccagggcgatgatatattgtttcatgacaaggcctcccttgatcggatgtactgctgtcacatagcccacaccgccgggctgctggtggataccgccgccgcgcccgcgcccatggccgccatgacttcgtccttgtactggatcagcccgcccgcaatgaccggggtgtcggtgcttgcggtgatgcgggcaatgatgcggggcatgattccgggcaagacctccaggaaatccggcttgcccacggcaagctgtgccggaaggttttccaccgacatggagtccagcaaaaaggcacgctgcaccgtcaccagacccagatgccgcgccctgcggatcacggccggtctggtggagatgaggccgtccgggtggcaaagggcttccagggcatccacggcggcctcccgcccggacagcccgtcgatgaggtcgatatggacgatggccagtttgcccgcggcgcggaccttgtccacctgggtgcacactccggcagcgctgccgtacaaaagaaacaccgccccgcactcgctttgcagcgcggcatccagcccggcgtcgtccttcaccgccgcaatgaccgggcagtccgaaagacggcggcagagggtctcatgctgttgctgattcgtgatgatcccaccttttgataaaacaaagcgggccgaaccacagtccgtcccgctcactactctccgctgtcattatggcaaaggccggaaaaaaagtaaaggcccggcccggaaaatctgtattttaccaaaatcgggcgggtgttttttggacattgtaacggtttttgtccatcccgtttgacaaacccgcggccgggtgctagcataaaatcaaacgatatgctccgggagtatgtgagtgcgggcgtaaaggcagacaggtgcctttgcgccctttttgcacccatttttcagcctcttccgatgtgtaaaggagtgtgcttttcatgtacgatgtcatcgtcatcggctgcggcgttgtgggcgccgccaccgcctaccggctggcgcgctaccgtctgcgtaccgccgtgctggaagcctgcaacgatgtagccaacggcaccaccaaagccaacagcgccatcatccacgcgggctacgaccccgaaccaggcacccttatggccgccctgaacgtggagggcaaccgcatgaccgccgagatctgtcagaagctggacgtgcccttccggcggtgcggttctctggtggtgggcttcacccccgaggatcgggccacactggaaacgctgtaccgccggggcgtagccaacggcgtgccggaactgcggctgctgaccggagaggaagcccgtgccatggagccctccctctcccccgaagtctgcggcgctctgtacgcccccaccgccggtgtcatcgatccctggggctttgccctggccatgatcgagaccgccgtccaaaacggtgtggaactgcaccgcagctgcccggtcaccgccattgaggctttgccggagggcgggttccgcctttccacccccaagggcagttttacagcccggtgtgtcatcaacgccgcgggggtggacgccgaccgcgtccatgaactgctggaaccggtggactggaagatgacccccaaccggggcgaatactatctgctggacaagagcgaggggagcctagtggaccgggtgatcttccagtgtcccggccccgagggcaagggcgtgctggtctcccccaccgtccacggcaacctcattgccggcccgaacgccgagccggtcgccgaccggctggatctgggcaacaccgccgacgggctggactttgtccggggccgggcgctcaagagcgtgccgggcatcaatttccgccagaacatccgcaatttcagcggcatccgcgccaacaccgaccagcatgatttcatcatcggggccagccccaaccatcccggcttcattgacttggcgggcatcaagtccccgggtctgtcctccgccccggccatcggcaagaaagcggcggagctggtgggcgcggcagggcttcccctggaggaaaagcccgattttctggatgagcgccatgtggtgcgcttccgccatctttcccccgaagagaaaaacgccctcatcgccaaagatccccgctacggcagggtgatctgccggtgcgagaccatcaccgagggagagatcgtccaggccctgcacagccccgtcccggcctgcaccgtcaacggcgtcaagcgccggtgcaacgcaggcatgggccgctgccagggcggcttctgcggtccccgggtgcaggagatcattgcccgggagctgggcatcccgcccaccgagatctgcctggaacaggacggcagctggctgctggcctgcgaaaccaaacaaccgaaggaggatgcaggcaatgtatgaactgatcgtcatcggcggcggccccgccggtcttgccgccgcctgcaaagcctgggaagcgggcctgcggaacattctggtcattgagcgcgaccgggagctgggaggcatcctcaaccagtgcatccataacggcttcggcctgcagcgcttcaaggaggagctcaccggccccgaatacgccgggcggttcatcgccatgctggaacagaccggcgtggaggtgcggctggacaccatggccctgcagatcatccccggccaggacggcgctccccatcaggtccatgccgtcaacggcaaggacggctatcaggtcctggaggcccccgccgtcgtgctggccatgggctgccgggagcgcacccgcggtgccatctccatccccggcgagcgccctgcgggcatcttcaccgccggcgcggcccagcgctatctcaacatcgagggctacatggtgggccgccgggtggtcatcctgggttcgggagacattggtctcatcatggcccgccgcatgacgctggagggtgccaaagtgctggcctgcgtggagcttatgccctattccagcggcctgacccgcaacatcgtccaatgtctcaacgactacgatatccccctgtatctctcccacactatcaccgacatccggggccatgaccgggtggagcaggtcacggtcagcgaagtcggacccgaccgccgccccatccccggcaccgagatggtgtttgactgcgataccgtgctgctcagcgtgggactgatccccgaaaacgagctgacccggggcgcaggcatcgagatggacccccgcaccagcggcgcgcaggtccgggaaaacatggagaccagcgtccccggcatctttgcctgcggcaacgtgctccacgtccacgatctggtggactatgtctcggcggaaagcgagcgcgcaggcgccgcggcggccgcctacgtcctgtcgggacagacggagccggacgcccccgccgtggccctgaaaaacggggagggcgtcacctacaccgttccccagttcatccgccccggcccgcagcccaaaccggcggaggtattcttccgggtcaaccgggtcaccaaagcggcggccattctggtgcgggacggcgcgggcaaggaagttgcccggttcaggcgcggccaccttgcccccggcgagatggagcacatccccctgcccgccgccgcgctgcaaaaggccgtgtcccccctgactgtctccattgaggaggtgccgcaatgaaagagcttgtctgcatcgtctgtccccggggctgccgcctgaccgtggatgaggacaacggctatgccgtcaccggcaacagctgcccccggggcgcggagtacggccgaaccgagctgcaaaatcccacccgggtgctgaccaccaccgtccgggtaacggggggcgtccaccgccgcctgccggtcaaaaccgaccgggccatccccaaaggcatgctcatgcccgccatggaggaggtcgccaaagtcagcctgaccgcccccgttcaggcagggcaggtcattatccatgacatccttggcaccggggccgacctgatcgccacccgcgctctggacgccgccgactgattttcccattccaacagaacagccccgccggattgaccttccgacggggctgttttatactgtatgctgccaatacaatgtgaaggagccttttgccatgccatacgacgccgcagcctacaagggcctgctggtccagggccgcctgcgggaagccctggattacctgtccgggttcccggaacaggccgcccttctccgccgcaccgaacggcggttcacatccccccggccgctgtaccgcggggacgacccgctgctcgccgccctggacaagacgttccagacctattataacgaggtattctggcaggctcttccccagcccgattgcgacgcccggctgctgggcaggcttgccccgctggccggcatctcggagagcagcctccccgccgatgtgaccgccgccatggaactggtagaaaaccacctggccgaactgctgctgccccggggcgtccattacctgggcggacggacgcaggggtatttcgggccgtacatctggcggacgaccaccgaacagaccgcccaggtggaactgcccggccgcgtccagccctgcaaggtctgcctgctgagcgatttcatcgcaaacggctggctggactatatctccctggggcagatcggcgcggcgggctggcaggacggggataccctgtactgcgtgctccaccgctaccgcggcggggtggagtcggaagcctttcaggtgtccttcctcaagcacgaggcccagcacagctatgaccgggaggtctgcggcgagacggcaggggttttgctggaataccgcgccaagctggtggagctgatctattcctcgggcatcggctgctttaaggggatgctctgctcggcggatgatgctttccccgccaactcccacgcttacgccgcctggcggatcgtgcgggacctttccctccgggtctttggggaggactatgtggcaaactacgcccgctggcagcaccgggtccgccgggtgcgccaggccgccctggactgctaccgggaatcctatcggccggagacggctgcctccctgcggctgtaagggccgcttacccggtcagagggcctggccctcttccggagcgcgcatgaggatgtccggcgtgcggcccagctcaaaccggcggacaacgccgtccttctgcagctctttcatggaaatgccctggatgcgctggttttcgtagctggtccagtagtaacacagggaatcggcgcacatgacaccgctgtataccgtgtagtcaaagggccggatgtcggcatcgtgggctgctgcaggcgcctgttccacccggaccatgcccagagggaaggctgcgctctgcagagcgtggaagaggttggccacgtcggttgcctcgtcagcgccgggctgggcgtatttctgcaggaaagccagccgcacaaagcgtgagggagaactccagtcccccggcaggccggagcagccgctgcccgagaagcaggattcaataacttcgggaccaaactgcatggcgccccggtcggcgtcctgcacgccggagaagcacaaaagatgggtgcggtgccaggcatagcccgggctgttggtcatgacgccgatgctgttgcggtagatgtgcaggccgtcggcgtccgactcgatgaccaccgcttccccaccccggtcggagaacatccagtgcaggggcggcacggtgcccagcagcggcacgccgcacagggtgacttcctgctgcagcatggtcacggcctcctccacggtggcacactgggacaggaagtgggtcaccagaagcggcggctgcagacgggtgccctgggcaggcggcgcctcaaagtgggcaaagttccggtagtagagctgggcgcccatcaggcctttttcgttgatgccgtcgtagaaggccgccgtcccgccgggcagcatcagccccatgcccatggcggcataccggctgcggaagtgctcggacgggcggtcgtcctgggcgtcgatgcagcactgatacgcctgcccggccggcacaaacaggataccggtcccctgggccagacggtcaaagtcaaagttgcgcccgtacagccgccgtccgtccccgcccggccagcagatcgcgctgcagcccgcctgcatcgccgccgcgatgccgttcaaagattccttttgtctgatatctgccatatgcctgaacctcctgtttctgcgcggaaagacgcctttccgcggttcgtttttctcccgatttttggccgccgccaccgggattatgcggctttgggattttcccgccaatttttgattgctttttgccgggacctttgctataatatagcttaccggtgttgggaaagcaagtcattgttcttctttcaccgaaaaaacatgtgcggtcgtagctcagctggatagagcgttggactccgacaactgtggcacgttaggcaatcggcaagaaattgctcggcataacgtgaaaaagcaggcacatcacccggtggttcgcggtagactgaccacgaattgaccaccaacccgattttcacaattttatacgatgaatctcgtcccagcgacgattttcataaatgtgcggtcgtagctcagctggatagagcgttggactccgactccaaaggccagaggttcgaatccccccggccgcaccaaaaaaggtcgctgtattgcagtacagcgacctttttttattttgtcacggcttagtgcttgtcaatccattttttgactatgtacgcggtaacatcggccatgacagacacgaaaaaactgataagatagctcatggaatctcctttccgtgctggttttgtacattgggcagcacgagagctattttatcagtttttgtttttataggaagattgttttcatctttctgccagattccatatccgcaatccctgcttctccgcataccgcaatgtgtatgctgtacctccggtagctctcgtacagtaaccgatgcagtaggccgagccgtccaccagatgccggtcgcgggccagaaaggcctcacggctgggggcgtcgcagcagtagaccaccttatcgaccctggattcaatccgcgcagcgcgggcctgctgggccgctgtccagcgactttggtagtcacggaacggcagcaccaggatcacccgaatttgcggatactgcccacgcagttccagcaatttttccgcgaccagcgtatcaaaccccagtgcgccgcccaccccgaaatagcggaccccctgctccagtagaagaatcagatgttcctgcacccgacgccagatagattcctcctccccagcaggcagatgacggtggccggtaaaacagcaagtttgtgcgcgcttgttcatggaaatcctcctcaaacacattatgtattacatatttgtaatatataaataatacaccaatgtgcgccataataactacaacaaaatgctcgggaggtacacgatggcgcaggaggataaatttattgtgccgcagcgcaaacctgcggtaggaaagtccacagtggtatcggtgcggctgcccgacaccatgctggcgaagctggaggacgtagcctccaaaacaggccgttcccgcaatgagcttgtgcagatgtgcatcgactatgcgctggcccggctggagatcaccgaagaataaaaaaccaggcagtcaccctcgcttgagggtaactgcctggtttcttttcgtgatacggacactgggaaacgcggtgcaaacagtatttcctgttataaccccatcacctttcccagcttttcctgtgcctctcgcttggttttatcaaaggcatgggcatagatatccagtgtggtactgggctgggaatgaccaagcagtcctgcaacggtgcggacatccacgccctgggcaatgagcaggctggcgttggtatggcgcaggctgtggacagataagttttgagacaacccgttttccttgagaattttcttgaaacggaaggtaaaggtcgtggggaccatgggatcgccgctcggctgccggaagaggtaatcttcctccgtcagagtcggcccttctgcctgttccatctgccaggcacattcctgcttccatgctttcaacagcttgcacatctctttgctgatgtacaccctccggttgccgcttgcggttttcggctccttggtaaagatcttttgtccgctgagtttgaccactgtccgctgcacatggatgctccggtgcctccagtcaatgtcagaccagcgtaatccgcaggcttcgccgcggcgcatcccggtggccagtaccagtttgaagtacacttcgtatttcatgctttgtgtttccagcgcggcaatcagcttctgcaccgtttcctcgtcggccaccgggcgctctttgcgcacgcctttgggtttgtacacccgccaggccgggttatgggtcaggtagccttcatccacggcaccggacaagatgctgcacagtgtattgtgcagcccctccacggaccgttccgatagcggctgtccatccgttagtttaggctctgagcgcatggcttcgtagaaggcacggatggtttccttgcgcaggtcggtcagtttgtaatgccccagtgcaggcagaatgcgccggatatcctgccggtcacgggaataggtactggctgccagcttgtctggggcgatatcccgcagccagtgttctgtatacgctgccagcgtcatggtatggttcaccggctgtgggtcatgccgcacttcccgttcgaacagaacagcctgttcgttcagccattttttgcactggccgggcgtgagatctttcggtgggtggaccgttttctgtgcggctttcagccggttcccttcgtaatcgtagccgcgggatactacaatgagataactgttttgtcctcgttttcggatgcttgccattttgaccactcctttgtttggtttgacacaaaggataccaacctctgcgatacaaagctatcaccaaacccaacgaagaacggccacgatacttgtgtaaacctggcaaaacaccaagagtttgcaaacataactaatagtgaggattccccaaaaagagaaaatcctcactgtgggtgtgccggacaaacaaaaaccccgggcgcattgcccggggaatgttagttctgcaaagtgtcgtagtattcttcctctgccggtgccagcagagaatcaaacaacccggcagcctcctctttgcagatatcctgcggatggcagtaggttcgttccagaaaggcggtatctgcgtgtcccagcaggtctgctgccacctgcttgctggtaccatgttccagcagataggtggcgaagaaatgccgcatggtgtgcaggtggtattcctcgggaaaaccgtttcggtcatacagccgccgcagatggtgactgaaagtattggggtgtactggcttgccttttcgctggaaaatcaacccgttccagtcggccccgttattttccagggcctgctcagtgaacagttctcccaaatcgtcgaagacgatctgaggcatgaccacgatgcgggtgcggtgattcttggtgtcgctttccagcacgccctgccccaccacagtgctgcgggaatgctgaattttcacctgattgccaccgtgcaggtcactccaccgaagggcgcacagctcaccgcggcgcaggccggtggagagggccatcaggtaatacactctataaagcagcggctcctgcagaatgcactgcaggagctttcgcatctcccattgttggggaatacgctgctgtaccttttccacccggactttttccacccggtgggccgggttgtagagcaggatgtcatttttcgcggcgtcctgcagcacagcggaaatggcatccagatatttatgtacggtgttttcgctcagaggcttgccgccctgccctggcctcttgcgcagttcttctgcaaattcctccaggaccacgggccggattttgcagagcggcaaacctccaatatacgggtacgccatctccaacatttttcggtagccggccagtgtgctggctttgtatcgcttcgccgcccggtccagccaatgctccgcataggtttcaaacttggtgttttcgctttcgtcgatgcctgtacggaatcgtttttccaggcgctcagcctctgcatagacgtactgcctgataccgcgctttggaatttccttgggaacatcaatggtgcgtgcatgcatccgttttttccctgttgtggtgtagccattacaaactgtaattttatattttctttctccgcgttgttgaatataagccatgttcattcctcctgcattatgacacctgtgacgacaatgacggtgatgacggttgtaacggcacatccggtgccttgaaaccattgtcataagcgtcattgccgtcatttccgtcatgcggacaactgcgaagccgcagaagccgctgtttgctggtacgccgggtactcagcaaaataccataccttgccagctcatcttcgtggctctgcaggtatcgggacagctgggcaggcccccataggcttccctcgttttccagcctggtagccaattcggtggcagtaccggaaaacggcttgtctgccaacaaacgctgcaaggcgggtaggagctggagcatctgcaactgctccggtgagcagcctcggctccagcggcagtcggaaaagtccagcgtcagttccatgtcttcaatatcccgtccggtggccgacagcgtagctgtcccctcctggcgcttttggcggtcaagaatgatcgtgccgtcggcggcaccgttcaggccgtttgttcccgatagctgcttgaaaggatccttgtcctcctgcttgcgcagatggtgcacaaccagcagacagatatcgttccggtcggccaccgctttcaaagcagaggcatcccggtagtcgatgctgtaggaggggctggcaccggttgcctcccggattttttgcagcgtgtcaatgatgaccagcttgacgcccggatgttcggccagcatctgatccagctgctgctccagcccatgcccaatcaagtgcgcgtggctgcaaaggtgcagaccagcgggggccttttcggtcatacgcaatgcgcggatatgcagccgccgtgagccgtcctccaaagagatgtaaaggacttcggtccgcctggtcttgaaccccaggaagagctctccctggcagaccgccaggcaaagctgcagcgccagccaacttttgcccactttgggcgaaccacccagcaagtacaacccgggtgccagcagatcttccaccacccaggggatgggttcgataggctgtttgtagagttcctggagcgtataggtattgagtttatctaacatagggcatttcctttcttgaaaaacaaaaaaagcacccggtgcccttgacatttctgtcaaaggcaccgggtgctttgtatgtatgatggattgaaaaaagggtacactttccccctgtatcttttcaaaaatcaaaaaacacgcgctaatatgcgcttttataaaaatcacttgcacaggcaagttttctattcaataaaagaaaagtagcagtcctgtttgccgctcgccccccggactggaggagcacaaccggtagggcgccaccgcccgttcacctgcagtcgttggaggtctaaggattgcaacctgaaacgtgcagccccatctgacgcgtggggaaacctgcgtatcattgtcaccactcgaaaggtcatggcggggaaatcccggtggctgatgggattccccttggatcgttgtggattcgctcgggccatagcggccatcctggcgccaacatcccgcgctctctttccgtggaacgtaccgatcgtgctgaatattcaattttcaaggtccagaaagtactttttactatacacgccaaatatgaaattttctttgttggctgtcgcttatttctcaagcggaggctgccgggctgcggcagcgcaacggggtttggggagagcccccaaaatttgcgtttggatatccaaacgctatgctagcaaaaccatctgccagcaggtgggggcttttgggccccttttccttcccagtcggtgggaaaaagccggtgagaaagtgaatcatgctatgattcactttcctgggctttccctcgtcatgtgaaaaaagtgaatcatgctatgattcactttttctgaaaagcagctgtccttgtgaatcttattaagattcacacctgcctggttcaatcagacagtgaatcttaataagattcactgcccccttgtttaccagcttaatgcgcaaataggaaataaaccttacgatttaaacaaggattcataaagaatttacagatggcatgacaaacactctgttttgcagccacccataatcagcctatcagctaaatatgccatatcctggcatattaaaaaaatgttctcagaaaattcataatatcggattgcaccgaacaaggaaatgtgcccacggaagcccccttcccgtcacaacccctccacaaacttcccaatcagcccgttcacttcgtccggcgcatcggtgttggcattgtgcccggctccgggaatccacaccagcgggatgtcggtgcttttgtgccaggccttgttgtaccggatgcaggaaccggcataatctttttctccgcagatcagcagcgccgggcagggaattttgtagggaaggtcggcttccatggtttcggccagtatccgcatcccatggccggacagtctggcgtatcgttcctggtcgccgtcgtaggtcatcatcatctcgtgcatcagggcctggccataggcggaggtggccacccctttcgacccggttttcagcagggacttccacgggtaatggcgatagaccggctccatccgtttcagcagccacagttcgatgcccgtcacatactttcgctgcagaggggccgaatcaatagccacaaagcccttcaatttctgagggaacaattccgcataggcttgtcccacatagccgcccatggactgccccacgatcaccggctggcacagagcttcccggcagagaatctcatccagccatcttgccttgtccatcagggaaaaggtcagccggaagggccaggaagcgccatggccgggggcgtcccataccagcagattgtattttccttcgaaacaggtaatctgtttgtcaaacagccggtggtcagcggtcagccccggcagaaaaaccagggtgatggcttcgaggccgcagtcacgattcacccagtaatgaatcttgccgcagggcgttgtgtagagcttttcctgcatggctgtcacctcctgcgatttctgctttcattatacagcagggcggggaaaagcacagccccttggagcagcatggacagcccccagcctctgtttgcactcacaaaaatcagcgccggaatctgtacaccttgcacagattccggcgatttgctgtgggcgggacactttctctgcggtaagtaccgtttatgtggacttccacgccctgaaaaagggcccggacggctggaagatcatggccaaggtattcaccgaagcctgagcgacgtccttccgatatacaaaaagacctttccgccccgcgtagggggcagagaggtctttttcttgtgcgggcccatacaggtggccgggagtatccacaggtcgcaactgccgattcaggcaagacaggacggtttgaccaccatctgaatctgaccactcctttctcccagccggttccgtgtattgttttttacgttccaacatcattttataaccatcaaaaacagcgccggaagttgtgcacactacacaatttccggcgctgtatcatcgtatttgcctgtgcgtcacagttctccgaccagactactacgaccaactgaactatagccgactgttttttgtacagccaagctccgcaaagcaaaaaacaaacgaattgtcgtcttttgtcccgggagtgtgaagccaatggaacgaatccttccgcgcgtcaggtcaatatcaggaagttctttttggaaggactctgacaatctaccgaggcctgttcctccccactatgactgctgacaattccatgcgctgagggccacgccggggccagccccaactttttcaagggactggaaatggtggcagtccgccacagcctgccctgaacgggaagaaggaatcccctatgtaattacagcgctaaattgcaagcgatttgtcaagggggcttttttctttccgtgacaaaatatgcccacacccatcggataaccatagcaatctggcaactcttcccaatcggctcgcacgtccaaaatgtcggccaatgcctggtgggtagggcacttatgaggaaaggtgggagacttgacaaaatatgcgccttacagatccggcgccgaagggcaaatcggagggccaaatgaaaaagtgcaaacgccggcggcccctgagcctcgccccggcaaaataagccggatttcggacgagatagacaatcccccttgagcggcggcggtgggccctgtatactgcgtaataaaagatggacaggaggcgccgttcatgtgggatttgctgatcgtgggcaccggcccggccggggtatctgccgcgttgaccgccagggccagggggctttcgttcctctggtttggcagccggcggctcagtgacaaggtcgaaaaggcagagcgtatcctgaattaccccggcctgccccgggtgaccggccgggagctgcgggacgcttttctgcggcaggtggatgatcttggcatcccaatccagcaagcacgggtggcggcggtctacgagatgggcgggcactatgctgtctgcgccgggccggatttctatgaagggcgctgcctgatcttggccaccggcgtggcggcacgcgggcagatccccggcgaaaaccggctgctgggcaagggtgtcagctgctgcgccacctgcgacggcgagctgtaccgcgggcggaacatcgcggtggtgtgcgaaagccagagcctggaggaggacgtccgctttttgcaaagcgtggcgggccatgtggaactgttctgcacctacgcgggcggcctggccgatacaccgggctgccacaaaggccggccccaagccatcgagggggacgaccgggtgaccggggtgcgctgggcggatgcgaccctcccggtggagggcgtgttctgcctgcgggaaacggtggccccgcaggcgctcctatccggccttgccatggaaaacggccatatccaggtggaccgggcccagcgcaccaacctgcccggctgctttgccgccggggactgcaccggccgcccctaccaatacgccaaggcggcgggcgagggcaatgtggcggtgcacagcgcgctggctttcctggcacaaccgcaggaggaaccgcgatgaaatccggctggctgggctacctggggcggctggcgggcgtgctggccggcaatgcgctgctggcctacggggtggcggcggtctacctgcctgccgggctggcagtgggcggcgccactggcgtagggctgatcctccacacgttgtttgggctggacactgctgtgtccgtctttgtgctgaacctgggcctgctggtggccggatgggcctgcatcgggcgggagtttgccatcaacacagcggccgggtcgctggcctatccagtgtttctggggctgtgccagcgtttgcccgacttttcactgctcgaaaccgaccgcttcgcggcccttgtgtgcggggcctgctttgtgggggccggcgtgggggttacacttcgggccggcgcttccaccggcggcagcgactcgctggccatgatcctgcaccggacaatccggctgccggtagcgggggtcaaaatggccgctgactacggcgtgatggccatggcgttctggatggctggcgggcgcaacctctggttcagcgtgatggccctggccatcgaaacttttgtgatgaaccggaccatgctggcgggcgccgcccagctgcagctgctggtgatctccgaccactacgaggagatccggcaggccctgctttgcgaggcacaggccggcgtgacgatgctccacgcagacaccggcctgcggcggacgccgggcagcgtggtgttctgcgtcatccccaacaagaagctgtacggcgtcaaggcggccatccgccgcatcgaccccggcgcatttttgaccatcgccgccgtccgggaagtgcagggccaggggttcaccgccgcgcgcatcccattgccggtgggaaaataggaggaaacgtatgcaatccaaacttgttgccgccaaggactaccatgaagtggctctggacatcccggcgtttgtgcccgaccaggccgctctgcaaaaagagctggaccggctccgcaacccgtatgtgacctgggagccgggcggcacggcggctgccggcgatatggtccgctgttcgctgcactctgcgctgccgcgctttcaaaaagacagcatccgctttgtggcgggcagcgggatgtacaatccaacgctggaagccctggccatcggcatgcaggccggcgagacccgcacggcgaccttgccggagggcgaggtcgccctgaccgtgcaggccgtgcaaaagcgggttgtgcccgcgctgaccgacgagatggccgccgcgtgcaagctgccgggggtgcgcacggtggccgggtaccggcgctacctgctggcgcagcagcgggacaaagccgccgcgcaggccgcctggacgctggccacccggatcaagcgggcggtgctggacgaatccgtgtttgtgctctgcaaggcggactggaagcaggcggtggagcgggagctggaccgctgccgggccatcgcccggcagagcggcatggtgctggaacagatgacccccgagcagtttgccgggaacatcccggtcaagagctacgctgagctggtggccatgacccaggacacctgctttgacagcctgcgctgctgcctgctggggcagcattacgcccaaaacgatggctttgccgtgaccgaggcgggctacgccgcgttcctgcaggactacgccgccacctggcataccaccgcggaggaggcccgggccgccatgcccaaagaaacctatacattcaaccagtacgccgcccatgccgaggaggtctggcgcgcccacgcggaccggctgtaccgggacaaaaacccgctgcccgacgcggaatgacccatccccatgaaacacaacaggaggcacccctatgattcaacaggccaacagcgaaaactttgaaagccttgtccaagacggttttgtgatcgtcgattttaacggcaccacctgcgtgccctgcaagctctttgcccgcattctcgaggatttggacgccgagatcccatttttgaacatcgtcaaactcaacaccaccgagaaccccggcctggccgaacagtacggtatccgggcggtgcccaccgtccagttttacaaggacggcaagctggttcacagccaggtgggtgtgatgcagccgcagcaggtcaaggatgtaatcgcccggtacatgtatgactgagccctgcggcggaaagcggcagaatagacccgcaatcggacagaatcgacaccgctgctgttttcccgtgtaaaaatgtggtaaaataaagccaataaccaagccggtcgtctgggaaaggatgtgtgcaggatgaaagcggcagccctcacacagccacacccggcgccgccggcccctgtcgcccgaacgcttgaccgggcgcaggcaggacagtaaagtcaatggagacccagccagttttgtgcgcggctgcggcgcccccggccaccgggcgcgccgcgcccgcaaaaccggcgggtctcgcttgctttccggggcattgccggaaagggaagggaggaacaaatggaacagaacgcattgttccgcaagcggtacggcagttttcggcgcttttttgccatgctgggcaaggcgcggctgccttatctctggatcgtggggtatctggcggtatcggccctcattgccaacgtgagtgtcagcacgaccgaatacagcgccgcgctgttcgccggccaggtgggccttttcgccgtcgtgctgccctatctgttttttacgctgctgtcgctggtgatcggctccatttccagcctgacaagcaacctgtgcctggcgcggatcgaccggaacctgcggcggatggtgtggaaaaaggtcgtgcatctgccgctgcaattctatgaggccaacaaccccaaggagctgctcagccgcatcaccaccgatgtgaccagcatcagcaccctgatcatgcaggtgcttttgccggtgttcaccacggcgtactccagcctgctgatgctggggcgcgtttccagctatgaccagcggctgatgtgggcgctggtgattgtgctgcccgtaaacatcctgatctcctttgtgctggggcggatgcgctttggcgtggcggacctgatcaaccggcgcaacgcacagctgaccgcggccatcgcggagcgggccaacaatatgctgctgatcaagtcgatgggcaccgaggaaaaagaagcggtcgccggcgaagcacggatgaaagcctcctaccaggccgaggtgaccgacctgtgggtgcgcggcctggcgctgccgatcaacgccatcgccggcgcgctgcaaagtgtggcgatcatcctggcgggccgtgccttctacagcgccggcgccctggacctgacccaatggatcgcctactacgggtttgcgatccagctcacaaacatcctcagcaactactgcaattcctggtccaatttcaagggcgcgcaggggtctgtggaccgcgtgtcccaaatcatggacgagcaggaagaaccgctggacaagggccgggatgcgggggcgctcgcggggaatatttcgctgcgggacgtgtgcttttcctacggggacaaaccactgtttaccggcctcgacgccgagatcccggccggacagatcaccgccatcgtgggcccctccggcagcggcaagacaacgctgctgaacctgattgaccggctgtacccgctggcaaaggggaccatcgccgtggacgggcgggacattgccggtatttccctgcacagtttccgccaggccgtgggctatgtgacgcaggagagcgtaatgtattccggcaccatccggcaaaacctgctgtatggtttggaccgcacgccggacgaccaggaactggaccgggtctgtgaggccgtgggcattctggattttgtgcgggagcagccggaaggctacgacacgccggtcggggaagccggggccagcctgtctggcgggcagcggcagcgcttctcggtagcgcgggcacttttgcagaagtcggacatcctgctgctggacgaggcgaccgccgccatggacatagccggcaaggactgtgtctggaagagcatccgtaccctgatggccggcaagacggtggtgtatgtggcccacgacgcccagacgctgcaaaacgccgactggatcctggtgctggaacacgggacggtcaccgcggcgggcgatcgccagacggttttgcagcaaagcgcgttctgccgtgaaatgatggacctgaaaggaggggcctccgcatgaaaaacaagcagaaagccaagttctcctttggggcgtacctgtccttttttacccgcttcccgatcccgtggtggctgtttttgctctcgctgctcctggggtttgccaacaccgaggtcgttctggccgtttccaactatctgatccgcatcagcaagggcgaattgtacaacggggtcatcatcggctatgcgctgatgaacgtattcaacgccctgctcagcatgctcatcaacctgaccggcgggtatggcagcgccctggtcacgctgcgggcgcgcaaactgctctggcgcaagatcctccacctgcccatgcgggaggtggagcgccgccagccctccgccctgatctccgggctggtcaacgacatcacccagaccagcctggtggtccagatggccttcaacaccattgtgtccctgtacagcttttttcgctgctgctgggagatgtaccgctttgacggcacgctctcgctgtacatgctgctgttgctgcccatcgcggtgctggtgttcgcgctggtgggccatctgcaataccagatgatgctccggcggtacgacagcctgaatgtgatgaccacctttttctccgagcatatctcggcggccaaacacgtcaaggcccaggcgatggaggacctggaggtggccgagggactgaaagccattgattcgcggtataaggccgacctctactacgccttcatggtggcggtccagacgctgtccaactccctctacaacaccatcggcacaatcgtcatcgcgctgtgcgggtcggatctgatccgccagggcaaaatgcccgagaccggcatcaacgatttttccacctacaagggccgggtggaccagtatacggcggaggtgctgacccactaccagactctcaagggcacccagggcgctttgcagtatgtgggcgtgctgctggacggcccggaggaggacccccaggcaggcaatccgctgccggacaaacaaacagcgcaggatatccggctggagcgcgtctcgttcggctacattccccagcagccggtgctgcacgatttgtccttcacgatcccccatggcaaggtgacggccatcatcggcaacaacggctcgggcaaatccaccctgctcaaactcctccagggcatctatgcgccggacagcggccgtatctggctgggcagcacgccggtggacgagtcgaagccctgcgaactgcggcggcagttcgggtatatcctgcaaaataacccgctcttctccgggtcggtccgcgacaacatcgcctacggcgaaaccggctcggccgaccagcgccgggtcgagcaggcggcccgcctggccgatgccgacggctttatccgccagttgccaaacggctatgacaccgacgtgggcgcggcgggcgcgctgctgtccggcgggcagcggcagcgcatcgccattgcgcgggccctgtacatccgccccacctacctgctgatggacgaagccggggccagccttgaccaccgcagcgacgcggcgatcttccacacagtgcgcgaggaactcaagggccataccatcattgtggtggcgcacgatatgcgcacagtgatggatgccgacctcattgttgtgctgaaccacggcgaactggaagccactggcacccacgacgaattgctggcggccagcccgacctatcgggactatctgaaaaagcagggctttgccctgcccggggaggaggcggcgaaatgaaacggtttacgatgatcttctcgatcctgctggtgctttgttttggcggcacacttgcgtatgtggccgccacgccggatttcgtgccgccgtccgccgccgtaccggcggcgcaggcggaggacccggacgccccggtctggaacgaaacgatggacagccttcttgcctgtttggaagagaaggggctgatcagcggggagcgcctcacgctggccagcgatgggctgtgctcgctggccgtctcggagagcggggccgagttctactggtgggacctggatgcgctggacaaggacagcgccgagtacgccgcctatgaaagcctgaaaactgagggcagcatcgacctgttcaacagcggcagcctgatctccccggccagcaacgggccgtttgcgctgctgacaacgggctacaccggcgacgtggacgccctgaccgatgcatttatggcctttgggcaaagtgaaacagaagcggggtgaagagatgaaaatgcgcaccctgctggtggacagcgacgagacgctgcgcaccaatttgtggaacctgctcaagctctaccagaactttgcgctggaaggcgaggccgacaccgccgaggccgccgtctcctttgtgcagcagcacccggtggatgtgatctttatcaaccaccagcccgccgaaccctgccgcaccagcactggggactgggtggcctatctgctggcccagacccaccccgatgtgcaggtggtgctctatgccgacacggccgattgggctttccaggcgtttcgcagccagtgcgccggctacctgctgctgccctttgacccgctggcgttgcaggcgcaggtcaaccgcctgcgctatgtgttcgacttgcaacagaccaagcgggaagccgccaaccgcagcctgctcatcaaaacgcgcatcggctatcagctcacgccggtcagcgacattttgtttgtcgagcgcagcaaccgcaaaaaccgcattgtcacccagtccggcgccgagattcacccgctgggctacacgatgaaccagttggaacaaatgctggaggggtgcggcttttaccggtgttaccagtcctttatcgtcaacctgtccaaggtttccttcatccgggcggacggcagcagcaaaacctacgccatccagtttgacggctatgacggcgaggtcctgctcagccgcgacaaataccccgaactgctcaccctgctgaaagaaaagtacgccaacattgacttttgaaaaaccggcctgccgggagatcgagagatgtccccggcaggccggttttctatagatattttgacttggtgttggtggcggggctttggcggccagcccctcagcacatcccgctggtcatcaggcggatgatggtgcggtcggtctcccgcatgccttcgctggccagggtgcccacgttgcggatggtgttctcgacgcccttgacgacaatgccgtcaccgccgtagaactggctgtggtgctgctgcatcttccagcccagcaggcccgcctccaccgccgaggcgatcttggccgcgcaactggccttggcgccgtcgcagatcatgcccgagtcgatggctaccgcgttgacgatggtgtgggcgatctccttgtacctcccaccgtgcaggtagcacaccccggccccggcgccgcacccggcggcggtggccccgcagtaggcggacaggctgccgatgccggttttcaggtgaatggtcaccaggtttgaaaccaccagcgcccggtaaagttcctcccgggtcgagcccagcgcccgggcgtaaatgatgaccggcagcgaggcggtcagtccctggttgccgctacccgagttgatgaccaccggcagttcgcagccgttcatccgggcgtccgacccggcggcggcccaggccttggcccggttgtgggtggagtcgccgtaggattccagcaaaatccgcccaatgttggcgccccactgcccccgcaggccctctttggcaatggcggtgttgcagtcgatctgccgctgtaagaccggctgcacgtcctcgattttaacagcgtccgcaaactcgacgatgcgctccaccgtcaaaaggatgcggtcggtagcgtgcttggggccttcctcggtgcaggggtggtcgagaagaacctcgccgtcgcgttcgagccggatgacgtttgtgtggaagccggcaatctcggcaaaggcggtgtggccgccgcccgaaacccgcacctggatgtcaaaaataaagtctttgtccgacgggtggacgtggacgatgccccgcttttcataggttgcgatctcttccacctgctccggcgtgatgccggccagcacctgcaatttggcgtcggcgtcgcccgccacaatgcccgcggcggcggcgacggtcagcccgcgctggccgccggtgttgggcacgacaacgctcttgacgttcttgatgatgttggcgctggcgtacacctgcacatcctccggcaggcagcccagcgccttgcgggccaacgcggcgcagtaggccacggcaatgggctcggtgcagcccatcgcgggctgcaattcctcggccaggatggcacagtattcgctgtagattttgtcctccatggtatcctcctcagtggcctttcaaacactctcgatgctgtccagcccgcaggcttccaactggggccggccgcccactacgcagacgccgccttgcagcgccgtttcgagcgcgtcggccagggccagcagcgtgtccggcgtggcggacagcagcgctttgcggcggcgacagcgctcggcgtagtccacgccctgccagtaccaggtgtcggcggtggtgccctgggcctggggcgagagcagcggctcgctgtctgacaccgcgccgatgatgaggcccgtcaaatcgcggctctcccggcagaactggcgcagaaagtcggcgcagcggctgtacgtttccaggctctgcacgccccgcgggtcgcggtaggaccagcatgccgccaggccggtgtctcgcaccgccagcccggtaccgtaggccccgccctgcacccgcacggcgttccacaggtattcaagccccagcagcttggacgccagctgccaagcgccggtgtagggctgcccgcctgccagaacgttgccgccgcagcaggcaaaggcgatgtcggccgggatggcaatgccctcccgccgcacgccccagggggccagcgcggtggcttcgggggcggcggcgccctcgggcagggccgcggccagacgggcggcggcctgcccggccaggtcatggtcggtggtcacggccagcgtcagccgggccttgcaggcgatggcgtccagcaggctttgcaaggccgggcgcagggcggcccagtcccaatgatcctcccgggctttgacccactggtacccggcaaacccggtcagatactcctgcgccgcgccggcagccgagaactgcgccaccagccggccgatgcccacattgtgcccggccatgatgcagttctgcatccgctgcgtccgcaactggcgcagaatgtcccgggcggcaggctcggcgctcaggtcggtggtggtcagcacctcggcggccaggtccagcgccgcgtccagcttgggttccagcgcgctcaggctcaggcagagtttgacatggcagcggctggtctcgccggggatcgcataggcggtggcgtaaaatcgcagttcgccgcaggtcagccggatgcagtcgttgagctgttctgccgtataatgccgggtgggcaggtggcccagcaactggcacagatagccgagctcgctcatctgctcggggcgcaggccgtcggcgtcaaaatagaaagtcaggtagacaatgccccgcgtcttgacccggtgcagcagtaccggaatccccgccagtgtggccgtttccagcggcaggtcggtgggggcggcgggcagatcggccagcgtcaggctgggcagcgtagccagcgcttcggggctgtccggcgtttgctgccagacgtccagttcctgctgctcttgttgcagcgcggtgcggtcagcctcggtccaggcggcggcctcccgggccagacggtcggcctcggtccggcggcggacctcgccggcggtgtggctcggggtcagcaccaccttggccctgtgcgggttttctaagaagatgcgccgcagcaggtcctcaaaatagccgccctgcattttggcgcgcaggctgtcgaacagcgcgcccacctggaggtttgcctccggccggccgccgtacagccagctttccagcgcctgcatgcacaggcccacgccgggcgtgtaggcgccgaaatcccgctcccgcatctcaaactcccgccgggccagggcggcttccagcttggtgcagtcaatgccctgttcagccaggcggcgcagctcgtcaaacactgcctgctcggcggcggccgcgttttcggcgttgaggtcggtgagctccatctgcagccaaggctgggccacactgtcgtacacccgcagcatcaggtcccgggccaactggcgggagagcaccgcccggcacagcggggattcgttgtccccggccagcacctgggccagcaccccggcggccaccagcgtctcgcggtcggcgtagctgcccagcacaaagccgtagcccagacgggtgcggccgggctcctcggcctcgctggccacctcgtactcgatgcgctgcacgccgccgtccaccggggcttgcagcggcgggaacaccgtgcgctcgctgcgcgcaaaactgcgcagatattcctcatccagcacccgcagcacggtgtccaggtccacggcgccgtccagaaagatcagcgcattggagggcgcgtagaacttgcggtgggcggccaaaaactgttcataagtcaggtctggaatgcaggccgggtcgccgcctgacacaaaccggtagggcgtgttgggaaagagcgcacggttgagggcgtttgtttccagttcgtcggcatcggcgaacgcacccttcatctcgttaaacacgacgcccttgtagtggggcttgccgtcggcgtcaaactcgtaccgccagccctcctgctggaagatggcggggttgtggtagatggccgggtggaacaccgcgtcaagatacacccgcatcagggtcagaaagtccttggggttgcggctggaaatggggtacagcgttttatccgggaaggtcagcgcgttcaaaaaggtgttcatcgagtgtttgagcagttcgacgaagggctccttgaccgggtagcggtccgacccgcagagcaccgagtgctcgaggatatgaaagacgccggtgtcgtcttttggcagggtggggaaggcgatgccaaaggttttattctcctcgtcccgctcgagccagaccagccgcgcaccggtctgcacgtgttccatctcgtacagggtggcgtcgagctcgggcagcggggactgccggatctcggtaaaaccgtgaaggagtgtgttcatgggtggtttcctcgctttctgcgatgaaaatagcggccgtcccgggggcggcaggcgcgaattgtccgtttcttatacttactgtaaaaggtagcaccggttttgtcaatttggtttgtcgattctgtccggtttgcgttctatttggtatggatttacagcgccaacgctgtgggcgctcctctgccacatttcgttggccatgccggcaagaatttcctgaaaatatcataagcatcgcttatttgatagacgccccgtcgcaaaaccgatacaatggacacaaaaaggcacaggttgcgaacaggaggccattgcgatgctgaaattgaccgaattgcaagtttcgtcccggaaccaccccatcgggctggatgagcagcccgttttttcctggaaaatggtgagcgacatccccgacacaatccaaaccgcctaccgcgtgcgggtgggaagctgggacaccggccgcgtggagagcggcgattccctgtttgtgccctatgccgggccggcgttgcagccgcgcaccgcctaccgcgttcaggtggaggtatgggacaaccacggccagacggcatgcgccgaaacgggggttgaaacagccctgcgggggccggatgggtttgcggcccagtggatcgccgatccgtttgagggcgaacacccgctgccggtgtttgagacagagtttgccatcgacacgccggtcacgaccgcccggttgtacatcacggcccacggtatttatgaggcggagctggacggcgccaagttgggggacgcctggtttgcgccgggctggaccagctaccacaagcggctgcaataccagaccatccctgtggacacggcgcggcttaccccgggccggcatacgctgcgtgtcacggtggccaacgggtggtacaagggggccttgggatttgttcccagccccaaccattacggcgaccgggcggcactgctggcgatgctatgcctggacggccgaactgtcgccaccggcgagggctggcgggttaccaccggcccggtgcaacgtgccgaattctattatggcgaggactatgacgcagcagcgccggccgccgcgccccggccgccgctgctgcccggactggacaagaaaaacctgatcgcgcaggaggacgagccggtgcgctgcgtgcagatgttgccggtggtgaaggattttctggcccccaacggggaatgggtgctagatttcggccagaacatcaccggcgtggtgcatgccaaactcgatctgccagcgggggcgcaggtgcgcctgcgccatgctgaatcgctggatgagaacggcaacttttacacgggaaacctgagctttgccaagtcggaggatacattccgctcagctgggcagccagctgagtacctgccgcggttcacctaccacgggtttcggtatctctgcgtggagggcctgcccgaatcacagcgtgacccggcggccttcacggcctgcgtgttgaccaccgatctgcgccgcaccggtcaatttcgctgttccgacgagcgggtcaaccagctgcagagcaacatccaatggagccagcaggataattttttggaagtgcccaccgattgcccccagcgcagtgagcgtcttggctggacaggagacatccgtgcctacggctgcacagcgctgtttaacagcgacgccgcactttttctgaaaaaatggctgcgggatctggcagccgaccagggcgaggatggcgcggtgccctatgtggtgccggatgtgctggacgcgccggggcagccggtctccacagcgtccttctggggggatagcgccgtcgtgctgccctgggagatttatatggccagcgacaaccactggctgctcaccgatgtgctgcgccgggagtggggattccaaggcatggtggtcaccgattggggcgcactgtgcaaccgggtcaaagcgatgcacgccggctgcgatctgtccatgcccggcggcagcaattatatggaggactgggtggaagccgccgtccaggacggctcgctgcccgagagcgatgtggacgcctgcgctgcccgggtgattgccctggtgctgaaaagtcaaacgcgccccaaaggcaaaccgttttaccgggaagcgcaccacgcgctggcccgtcgtgtggcggaaagcggtgccgtgctgctgaaaaacgaggatggcatcctgcctttacaggccgaggatgtggtgttgatcggggagatggcccgcaccatgcgctaccagggcagcggttccagccacatcaatcccactcgcctgatcagcctgtgtgaggcctggccgcaggcgccgtttgtgcccggctgcgacacaaagggcaatgtgaccgaggaaagtctggcccaggcggctgcggcagccaaatctgccaaggtggcggtggtctgtgcggggctgcctgatctgtacgaatcggaaggctttgacagggagacgatggctatgccggaagggcatgtgcgtctgatcgagacggtggctgccgccaaccccaacaccgtggtggtgttgttctgcggcagagctgtggagacaccctggatcgaccgggtcaaggcggtgctgtacatgggcctgcccggccaggcaggcggtgaggctgccgcggcactgctgaccggcacagccaaccccggcggcaagctgaccgagacctggcctttgagttatgaccaagtgcccagccgggataccttcggccagaaggtcacccgctataaagaaggtctgtatgtcggttaccgctactacgacacggccggggcgtcggtacggtacccctttggctatggactgagctatacgcgattcgcgtacagcgacctgacggtggagaaccgcacggtgcgggtcgccgtcacgaacattggcgattgcccgggcgccgaggtggcgcagctttacattgcgccgccccgcaccgggccctaccgcccggccaaagagctgaaaggctttgccagggtttatctgacccccggcgagagccgcaccgttgacttcccgctggatgaccgcagctttgccatctggtcggacggctggaaagttccggtcggcacgtacacgctgctggtcgggtcgtcttcggcagacatccgcctgcaacaggagatcgagatgccaggtgcggatcttcccgcccccgcctggcaggccggcagctggtatgaaaccttgcagggcctgcccacggacgatgaattcgccgcactgtatggcagcccgctgcaagacgatccgccgctggaaccgggccgcttctcaatggaggactctatcatggaaatgaaggacttctccccactgatgatgcaagccttccgtggtaccgaagccaccattgcgcagggatttggcgggaaagcggactacagcaacccggatttccgcatgatgattatgtccggcgccgacgcgccgcttcgtgcagcggtgctctccagcggcggcagcttcccggccgctgcggcacagggactgctggccgccgccaacggccaggcggatgggccggcgtgatcggacaaccttccccttcggccagggcacggcagggacagttgctagggctgtgaaaactgcacaaacctgtccgcggaaaattttgtacagcgctgtatggcaacagctctgccagcacacctgtccggaacaacgaactgagcagaaaatagacaacaagcaaaagcgggagccgcctgtgaagtgcggctcccgcttttgcccgtgacgtggccatactccacacggcccgtgccgaaatattcttttgcagcctgtgtgtgatggttgggggttgctttcagactgactctggcaaagaaaagcctatgcaaaccggccaaacacgagcgcctcaatcagagcgggaacgtgccgttgcaagtgcaatgctgtgtgtttctcagcccgggcttaccttttgtgttggacgggaaagcccccgcgcagggcgctggccagggtcatcaggcggcccgcgcaggcgcgtacatcggtttcggccaggcggccgtccgccagggcggcgcggatgtcggcgtcgtcgtgggggttgcccggcataatgacatcgttgccggcggcggcacagcgccagggctcgctgccgtcggtggggacggtggtgttccagtccgacatgataaggccgtcaaagccccactcgccccgggccaccacggtgcagaggtcccggttgttggcggcctgcaccccgttgatccggttgtaggaggtcatcatcgccgcgggggccgccgtcttgacagcaatctcaaaaccgcgcaggtagatctcccgcagggcctgctcggagacccgggcatccacccccatgcggtggtcctcctggttgttgcaggcaaagtgcttgatggtcacgccccgggtgccgtccgcctggacgccccgggtgacggcggcggccagcaggccggagagcagcgggtcctcggcgtagtattcaaagttgcgaccgcacagcgggttgcggtggatgttcatgcccggcgccagccacaggtcgatgtggaattccgccatttcagcggcgatagcccggccgaattcttccatcaggccggtgtcccagctctgggccagggcggtacccaccgggaaggccgtgcagaactggtagtaggtgtcggcggtatccagatgccggggttcatccaggaatccgttttccagcgaacccagcacgccggtgggaatgaccgaaccgtcggcggggtctacctggtagctctggcgcagccgcagcccggcagggccgtccgccatgatgagagaaggcaccccgcggctggcttccagcgcttcggaggtttctccggcggaaccgggcacccggatgcccgcagaccccagcgtgctggcgccctgggtaatgttgccgtacagcatgggtaccagctcctccaccgggccgtcggccgtcggcacgggagccggtaccggcacctcgtcaggcaacggcgcaaaggcgaaagcgggcaggtccagggccaccgcttctgcggctttttccatggccggggcggcagggcccgcctccccgaagggatggtgcagcgggcagatgggatgggtggtctccagcaccacctcggcggccaccgtcaggtgggcacagggcgcggcttccgccaggctgcctcccgcaaagagggtgtgggtcccggcggggaccacccaggcattgcgcccgggcaggaactccgccagctgtttggcgggtacgttcaccgttatcgtctggctctccccaggggccagggggcgggtcttggcaaagccggccagccgccggtattcccgggcggtgccggtctgggggcaggccgcgtaaagctgggctacctcccggccggtgaaccggtccccggtgttggtcaccgtcaggtccacctccacaccgtggtccccggcgcgcagcgccgtgaaggcggtggcaaaggtggtgtaggaaagcccgtggccgaagccgaacagcggctcgatgccgaagctgtcaaaccagcggtagcccacatagataccttcggtatacagttctttttccaggtcgccgttacaggcgccgaaggtgtcggcacagggataatcggcatagcgtttggcccaggtggcggtgagcttgccctccggcacggcgcgacccagcagcacatcggctaccgcttcgccgccctgctgccccagctgggaaagctgtaccacggcaatgggatggcggcgctgagccagcagatcggtcagctccaccgggcccccggcattgatcagcagaaccaggggcagaccggcttcgtccagcgtgcgcagatccgccagttcccggtcgctgagcagataatcccctgcggtgggggtgcggtccttgccctcgccggaaatacggctgatcacatagattgccacggaggctcccaccagatccgacatggccaccggacggccttggggcagtacaaaggggttggccgcataggcgtcaaagggattttccaccttggtggcatcgtccagaatcttgtccttccaggccaggcgtgccccgtgatagagggcttcgtagtagttgatccaatcttcgctggtcaggtggaccccggcggcccggagcccttcataaatggaaacgttggcccggttattcacatctcccgaaccgataccgcctttgacggtgcgcccggcaccggtacccagcaaggctaccgatgcgtcgggggccaggggcagcacattgtcgttgcgcagcaaaacgatgccggcagctgccgctttgcgggccagggcggcatgggcggtttcccggggggagggggcagcctgcaggctgccgctgtaggtatgggtgaattccatagtaaaattcctctcgaaaaaatggtttgagaaatgcggaaaaaccgccatagcagggaactatgacggcttttcgcgcaacaggagaaaaaagtgaaaaagcagcttattccttgacgccgcccagggtgatgccggcaatgatgtacttggacagcagcaggtagacgatgatgataggcacgatggccaccgtgatcatcatgtagatcttgcccatgtcgaagttcatgtagtcggcgccgcgcagcgtggcgatgaggatgggaacggtcatcttgtccttggactggatgatgagggcgggaacgaagtagttgttccaggaacctacaaaggtgaagatggcctgtaccgccacagcgggtttcatgatgggcagtacgatgcggttgaaggtcatgaactcaccggaaccgtcgatacgggcagcctccaccagggacaggggcagcgaagattccaggtagctgtacatgaagtagaacaccgcgggggatgcgatggaagggatgatcaggggcagcagcgagtcatacaggccgatgttggtcatcaaccgcaggaagcccatggcggtgacctgggtgggcatgaccagaatggccatgatgaaggtgaacgccacctttttgagcttgaactggtaggcgtacaggccataagcggtcagggccgagaagtaggtgcacagcgccgccgagcaggtggagacaacgaggctgttgaagatgcccttgaacatggggaagctgccgtcattggccacgtttttcaggttttcgaaaaagtagttgccgggcagccaggaaaagcctttttgcaggtcggcgtgggaacgggtggcgttgaccagcaggatgtagaagaagaacaggcacaggaaggacagcacgatgagcaccagataggccaggatcgtttcgcccagtttattcttggtatgtttcatgctttgtggcctcccttatgggttttccggcttccgtccttgttgctgccgttggtcatgcggtagacaaagaagcacaggatgccgctgacgatgaacaggtagacggacagcgcaccggccatgccgtagttacggctcttcaggtggctgttcaggaacatgatcagcgtcatggaggtgcggtcggggttgccctggccgttggtcaggatctggggcacgtcgaacatctgcaaaccgccgatgatggaggtgatgagggtgtaggccaggatgggccggatcagcggcagggtgatggagaaaaaccgtttcaggctgccgcagccgtccagctccgccgcctcaaagatatcggggctgatacccatgatggcggccatcagcatgatggtggtgttgccgaaccacatcaggaagttcatcaacccgatgagggaccgggtgccgaaggtggtgcccataaagtcgatgggggtgtcggtcaggccgatggacatcaggatagagttgatgggaccgttggtggagaacaacgcgaagaacagcatggcgaaagccgaagccatgatcaggttgggcaggtagatgatgattttgaagaactgcttgccgcggatcttcaggcgcacatcggtgaaccagttggccagcagcagggcgatgacgatctggggcacaaagccgatgagccacaggatcagggtgttgcccgcatagccgatcatgtcggatttcagcagttcggcatagttttccaggccgataaagttggggccgacctccttgatgccggagcggtagtactcaaaaaagctgtaccgtacggtatccaccagcgggatcagggaaaagatgaagaaggtcacaaagaacggaaggatgaagatatagccccatttggcatagctgagatgatgttttttcttgttcataggtcaccgttcctttccggaaaaggctgccgcaccggggtgcggcagctgattttcagttcttggtccgctgtgggaaagctcactccgcccactggatctcggtgacgtcgggatagcgctccttgatggccgtctcaaagttggccttggcgcggtcgtagtccacgttgccctggaagtagtcgctgaacgcgttctggatcagttccacgcagccctggtcgtaggaggacaggggcgcgatctggatgttttcggctacaggggcaaagtactcataggggttctggccgcccaggaagtccgaagcgaaggaggcatcggtagccgcttcctgcatgccgctgacggtgttggtgaagtccaggtaatcgcgggaaatcttgagcaggttgtccttgttggccgtcagggagaggatgatgtccttgacatgttcggggttgtcggtgccggtggcggcatggatgtaggaaccgccccagttgtattcctgcgggggattggtcacgccccaggcgccgtcctcaccgtcccagttggggttcagggtgaagtcgatgccccaggcgggcagcaggaaggcaaataccttggaggaagagctcatggacttgttccagtcgtcgttccactggcccttgacggtcttgtcgaagtaaccggcatccagccattccttggaggagttgatccagttcatgatctgggggtccaccttgacggtggtctcaccggcagccacccacggctccgagatgctgttgccgtacaggcggaaggtgtcggcgtaggaagcgaaggtgtagtagcccttggctttcagttcctcggcggtagccttcagggtgtcccagtccttgaccttttcgcccacagcggcggggtcatcggtgccgaacacgtccttggcgatgtcccggcggtagaccagcaggcccgggcagcactgccaggtggagccgcgctgtacgccgttctggtcggacgcggtggtacgggtaaaggcgtactggtcggccaggtcggtgtcggggtcgatgcccagatcggtcagcggcatggccacgtcggcgtcggcatcggtgtatttaaagacgtagtcagtctcggacaggaagatgtccaccttgtcatccgcagcggcggaagcctggttcagcagggcttcatccagcttctgctggtagacgccgtcctggttggggttgatgatccagtggatctcggtgccgtctttcagggtggtgacggtaccgtcggcagaggtgctttccacctccgggtagatggcttccaggcgggtgcggaattcgtcgttccagctgtagatgttgatgacggcgccctctgcggaagccgcctcaccgccggtctcgccggtggcattggcagcgccggatgtgctgccgccgcaggcagccagcaggcttgcgctgatcgccgtggccatcagcagggaaacaactctttttttcatgcaaatacctcctacttggtagtactcccttggagtaccgattccgttatcgtgaccctattataccgcgcaaatcccggcgggatatattagaatcaaacaaaaaatatcaaatccatgactgctttttgtccaaaatgcggcgttttgacattttgccggcgccggggccgttgcgggaccgggcggttcgtagtataataaacacagcaatacgcccccggcacctttcgggggcaaggcatacggcaactccacaagagagaggagttacaggcgatgagctaccaaaaagaatggctgcttctggaggctaacgacgaggcggacgagatggaacaccgggaccccggcgaagaattccagttttacagcgcggtggccgggggcgatgtggattatgtgcgccgcaattgcgaacagggccgctttagagaaaatgagggggtgggccagctttcccgggacccggtgatgaacctgaaataccattttgtcatcaccacggccatggtcacccggctgtgcggccagcacggcatggaactggaacaggccttccgcctcagcgatttttacattcagaaactggacgatctgcataccgaggacgaggtctgcgccctgcatgacgagatggtgatggattacaccaaaaagatgcgcaaaaacctgcgcagcgacaccaactccaaacatatcaatgccagcaaggattatatctacgcccatatcaaggagcgcatcaccatcgaggacctggccgatgaactgggggtgtccgccagttatctgtcccggttgttcaaaaaggaaaccggcctgtcggtgtcgtcctacatccgccagcaaaagatcgagatggccaaaaacctgctgcggttcagcgacagttccatgatcgagatcgccaaccagctggccttttcttcccagagccactttatccagcagttccgggaggttaccggcatcacccccaaaaagtaccgggacgaaagccgcctgaaaccctgggactgaccgttttttcctctgacgcaaaagccccccgccgatccggcgggggttctttttgtatggagcttacagtaccagcagaatgtcgttttccgcctgcagtttttcggcgggcagatagttgtcgggcaaaacttccccgttcagggtcaggctggtgtagccggattccctgccctgggggttttccacccggatgtacagctttttgccccggaaatccttctccatagtaaagctttgccagctcttgggcacagccggagccaggcgcagaccgttcaggtcggggcgcaggcccaggatgccctccacgcagcccaccatgacggtggacgccgtgccggtgagccagtgcacctgggagcggccgaagtgggcgctggccgggccctcggtgaactggccgtagcagtagggctccaggcggcgcacttccgcccggtcgttctgggcggcgggggcgttctcggtaaagtaggtgaaggcccggtccccgtggccgcagagtgcctcggccaggatcagccacccctgggactgggagaagataccggcattttccttggtgccggggttgtagatcaccgccagggcaccatcaaaggcatgggcgtggtaaggcgggtccatgagcacggcgccgtaggcggtgttcagccggtcgtagacctgggccatggcccggtcggcctggtccttgtccgccagcccgctgatgaccgcccagctctgggggttcagccaaaggttggcctccgggtcggcggcggcgccgatgcgctggccctcctcggtaaagccgcggatgaaccggtcgccgtcccagcaaagatcctggatcttgcgggcggtgtcggccatggtcgcttccagatggcggcaggcggcctcgtccccccggtcggcggcaaaccggcgcaggatctcgagggcatagtagaactgcagcgccacaaaggtggactcgccgttggcgcccagccgcaggcagtcgttccagtcggcgtagagcccggcgggcaggccgtgggggcccagatgatccagcgagaactgcaccgcccgcttcaggtgctcgtagacggtgccttcgtccttgttggcaaaggggatgacctcgtccaggaaggccttgtcccccgtctcggccacatatttatatacggtggggaagagccacagcgcgtcgtcggcgcggtaggccgggtggccggtctccgccacataggaggcatcgtcgggggtgtcctcgtggccgggattgtgggtgaatttgaccaggggcagaccgccgccgttgtccacctgggccgagagcatgaaccggatcttctccttggccatggccggttccagatggatgatgccctggatgtcctgcaccgtatcccggtagccgtagccgttgcgcaggccgcagtagatcagcgaagccgcccggctccacacaaaggtgatgaagcagttgtaggcgttccaggtgttgatcatggtattgaaggcgtcgtcgggggtgtggacctgcagatggtccagccgtccgtaccagtcctgcttcagggcctccacctcggcggcacagcggggggcggggtcggcgtagcccgccaccagggcggcggcctgctcggagggcttcatccccaagaggaaagccacggtacggctttccccgggggccagcttcaccacgcaggaaagggcgccgcaggcgttctcgttgtagctcagcacgttgcccaggtcgccggatgccaccccctgggggttgccgtagtcatggtaccggcccaggaaggcttccttgtcgccgcagtagctggccacgtccgcccccgccagcccgaagaaccgctcggtgacgttcttgccgtccaccagttcgtcggtgggctgggcgtccagattgccgtggatctgctgggtgatgcggttgcccgcaaacagcgtccggctgatgaagagggagtactgcagattcacctggtcctgctcgtagttgttgtggttggtgaactccgcgtagccggtcagggtcagttcccggggggtgtcggtggtgttggtcaccgtcagctcccagacttcatgggcgctgtccttgggcacatagtagaccgcttcggcgtggatgcccgcatagtcggagagcatccgggtgtaacccatgccgtggcggcattcgcaggcgtagtcctgcaggtccttgcccaccggctgccaggaagccgaccagaaatccccgctggcgttgtcccgcaggtagaggtaccggccggggcggtcaaactggttgaagacatagcgcaggatgcggccgttggcgccggacttggcaaagctgtagccgccggcgttgttggagatgatggcgccgtactccggcgagccgagatagttcacccagggggcgggggtatcggggcgctggaccacatactcccggtgggcatcgtcaaaatatccgtattgcatcaggaagaatcctccttgtttttataccagttccgccgtgatcaggccgccctcggcgggcagctgctccaccagggcgcggggcagcttcacggtgccgtcggcgccaggggtcacggcggtgtcgccgcaccggacttcgcccaggcggtagctgccggcctccttgcgggcggcgttatggtagcgcaccgtcagcgggcggcccgcaaaagtcagccgtagttcggcggtgccggtttcatcaaactgttcggcggtgagctggggggccagcagcaggtcgccggcctcgccccggacgccgaaggcctgggtgatcatcgtcagcatgaaccagctggccgcgccggtgaggtagtggtagaccccccgcccgtcggtggagaagtattcgggaatgccggggtagatgcggctggtctcaaagtgcagggcggcgtcggccagggttttcagggccttccagccctccttggcaaagccccggcggtagagggcgttggcgtacatcaccgtcatgtggctgaagacagccccgttctccttctcgccataggcaaagccgaacatccggcccaggttgaatttcagttcgccgaagtcggtgttcagccggtagccgccgatctcggggcggtagaggtagtggtcggcgctgcgcacgatgcggcgcacctgttcctcgtcggccaccccgcccatgacggcaaatacctgcccggtgagcatcatccgcacaccggcggggaagaacccttccacccgctgaccgtcgttgtcgtagtagctgttgaaccagccctcctcgccgccgtcgatccattcctggcggcgcagatggccggtgagccagtccgcccgcttttccaggtcgtcggccaggtcggtcaggggcacccgcacggtgcggccgctcagggtatggcggcagcgctccaggtactgccccagcagcgcccgcttgccgttccggtcgtcatagtcctggctggggcgcagcagcaccgtcagttcctccatcagctccgcttcgccgccgggggtacgcccttccagccggcgcagcagggcggccagcgtccgcagattgcccgcataggcgcaggtgaaggccacgctctcgccccggtcggcggccatatccagggcgtcgttccagtcggccccccgcaggcggtagaggttgtgctcgcccacatcgtagaaggcggtgagctgctggagcagcagatgttccagcagggtgccgcggtagacctcccccgtttcggtgcgctgccagctgccctgttcgggggcccaggcctcgtcgatgccgttgccccgcatcgcctgggggtccttgaagtagggggccttgcggtccagcagggccaggtcgccggtctggtccagatagagctgggtggtcatctggggccagagggcgtggtccatccagacccgggcaatgccgttgcggtcggcgatgaagttgccgtccccggcgccgatgatggtggcgttggtgccgtccacccgcacgccgccgaagttggcctcgatcatccggcccacctgacccggttccatgagcagcagggagaggcagtcctgccacaggtcccgccagccacggccgccccggccatagtcgtggtggggcaggaaggagcagccgaagagccgccgcaggtagggctggaagcagacccacttcatcagccggtccccgtcggcgtcgccggtggcaaaggccacgttgaccttctccttccagtagcggcgggtctcggccagggcggcgtccaccttggcggcggtgtcataccggacaaagagccggtcgatggcctcgtcgctttcctccacccccagcagcaggatgtaccgggccgaggcaccgggggccagggtcaggggagcaaagcggaaggcgcccatggcctcccgtccggcgcggcaggctcccgccggcacgccagggtagttttccagcaccgcccggggatgggtgaagttgccgccctccccgatgaactcctccaccgtggggtagaaggctgccggggcctggccgtcggcgccgtagcccagcagatagtagactttttggttgggccggtggccccgctcgtcaaaggacatggtggggcagacccgcaccccgtgggcggtggtgcggatgcggtggagcatggaagtcacgttgcggtgatcccgcaggttgtcggcgctgcgaccgtagaggggtaccgccccgtagggggtgaaggtgagggtgctgtcggcgatgttttccaccgtgacgctgagcacttccacattgtcccccaccggcacaaagctggtcaggacggcgcggacccccgccggtttcagtgtgcgttccagagtgtgccacataaagcccgccgtcaggcggctgtcgtcctgggcgggggtgaacttcaccgcctgctgggccgccgacgcgccggtaagggaaagggcggtgccgttcgcccccaccagccagaaattccgggtggagcggttgttgtgcaggttttccacgctcaccggttccagcagaaaggtctcctggtccagcttggcgtcgccgcccaggtccggtgaaacacagctcttcagcccggcttcggaagccagcggaaagtacagctggctgatttcttcggggcggtccagtgtgaagctgccgtccgcatcgataaaatggggatgctgcatggtattcctccttgttgcgtttttgcgtccggtaaggccggacaagctgccgcgagtctgtctttggtaccatcatagcgaaatttcccgaaccgaaaaacaacaaagcaggcaaaaatgtcagattcatgacattgtgcaaaaaaacctgtttttgcggcggctttatgaaaaaaactcaacaaaaagtacaagaaagagcgagaaaacggcgcaggaaagaaaatgttccttttgtgcagccgctgacttgaccaccatctgaccactccttcttcccagccggttccgtgtatcgtttgtacgtcccaacatccttttataaccatcaaaaccagcgccggaagttgtgcacactgcacaatttccggcgctgtatcatgctattttcccgtccgtcacagttctccgactccaaaggccagaggttcgaatccccccggccgcaccaaaaagggcgtattgcaagtatttttgtaatacgcctttatttatatttatttagaaagagtggcattcaatagtggaaaatgaagtctttcaactaaaactgaatagggagacatctacaaaggccttaaatgattgggttttacatcaaataaaattgggaaattatacgatagatatcaattgcgctgactcaaaggcatactcaaatgtctgtgctcccgttgccgcagttttagagtactatagagaaaatggcgtaaagtttaacattacgtattcagataacggctttgaaagctatgtaaaacaaagtttctttgagtgtccacagattgttgaacgtgaagaaaacaaaacggaattaatgcatccgtttaacaaagtatggaaattttcaacagaacaaggggtatatgacttagccaaagccccgtaaggatgttttttgaaagggatacggtgtaaccccgttttcggggttgcaccgttttctctattaggctgtaagcctgtattcctgcgggtttgactgtattttctccatcaggcttttgatctcgtcctctgtgggaatgtcaatcagtccgatagctgtgaagtagatgtccaccttcacagagcagtgaccgcttgacttgtcgttgttgtgaacctcgatcctccgtatcagcgagttgacaagcgttggcgtcagttcctcaaacgccgtgctgtttcgcaggactttcagcaggattttcaggtcaaggcttgtctgttctatactgacaagccttttctcgtcctcatcgacccttttgacaagctccctctgctcgttttcgtaattgaccgacattcttgcatagcgttcggctgagatgttgccgaggacctgatcctcatagatgcgctctatcagcttgtcaaggtcttgaatacgccgctttccgctttcaatggaggacttgagcctgtttgtttccgtccgcttggatacgatgtctttctgcgccatcaggtatagaaacaccggttcatagcatctaacgaagtccgccaagctgttgatggcttccagcacgatcttttccagcactacattgcggatatagtgtatctgacagtttcctctgccgcttttgtagttggcgcagcggtaatgctcctgattggcgttaaggctcttggcggcacagaagtggagctttgaaccgcagtccgcacagaacactttgccggaaaaaaggcttgtcctacccgttgctgtcggacggatgcggttctcacgaagctcctgtactcgtttccaggtgtcctcgtcgatgatggcaggctgagtgttcgggatgatctgccactcgtcctttggattatacacggtcttgtgaaccttgtagctgaccgtggtggtcataaagttcacggtgcagcccgtgtactgctgattggcaagaataccggcgacggttttctgatcccaagcgtatgggtgggtatactgctttcttgtttttctgccaagcgaagcgtaataggcggaagggatgagaaccttttcctgttcaagttgctttgcgatctgcaacggacctcgcccgtcaaggcagagtgcgtagattttccgcacaatatccgctgccggttcgtctaccagccagtcctccttatcctgtgggttcttgacatagccgaatgggacggaggaactgacccgcttgccgtttgccgccttgttcttccataccgcgcggattttcttgctcgtttgagcagcataccactcgttaaaaatgttgttgaacggcatcatctccgtgcccgtttccttgagggtatctacattttcctgaatggcaatgaacctgacgccgagggtcgggtatttgatttcaagatagttgcccacatcaagataattcctgccaaaacgactgagatcctttacaatgatggtatctaccaagccctgttccaccaagttctccatttggatgaaactcggtctgtcgaaggtcgtccccgaaaatccgtcatccgtgaaaaactgagggttcggaaaattattccgctgtgcgtatgcaagtaaaatctccttttgattcgatatggagttactgtcgccttcccgcccatcgtcttgagaaaggcggcagtagagcgccgtgattttggtttcgctttgccctttgatatagtttgctgttgccattgtcatatctcctttccgacaaccgggcattgcaaaggcactattattttactgtgcctttgcattttccgcaattatgcgattttccagcaaatcctctgagagtatcaggtcacggaactgctgtaatacgcatcggctgccttcgggatcaaagtgggtggacacctcgtataccgtgccgccgatcttcatcctgaaatcgctgttgccaaagccggagaaaagctcgatggtggcattttcctttttcggagtattgttcatcatcgcccctccttgcttctttcaatcacaagatagtcatagccgtagctctgacacttatcgcatttgtccttggctttcgcaaagggatcaagccgctttacgatgtagttcgggctgttcttgtaactctccaagcatttcacgcacaggcagcgcatatcggcaggcttgcaatagggcttatccacccaaagccccagtgcctttttgacaccgatattgattttcttcatgcaatgttcgtcgtcgatttcgccgatgtactccaagaggtcggcttggttgaccgttcggagctgctccagcatcaccattgacggctctttcagcccgaagcggtcgaccaaaatgatgtgggacgggagataccgcttcttgattaccgtggtcattgccgcgattaccgtagtacagcttgccttatttccctcgtcgcactgaacaaccaaggcgggacgcagcccgttctgaatggagccttcgtttgtgccgaagtcgtagagatagatttcgccgcgcttgaccttgctgatgtttttgttttccataatgtaaaacctctcattcctttattttgaaaggtgttttccgaccgttccgaaacaaccccttcacttactctgaattaggagtccaaatttgagggtgttttcaaaaactttttcatcttttttatcgcagctatgtaaccctcctgcacggtcttgatggatttctcttcgtccttggctatccgtgtgaaggttttaccttcgaaaaggtgctgtcttacatatttcttctgcgtgggcgtaagacgggcaaacgccgcccaaactatgcggctgtctttctcttcctcaaacagttccccggtaaagtcgggaacacagattccggcgttatacagctccgttgtaccgtcctcaaagccatagctgtcatcccgctgcatccgcttgaaaaacttgtcctcgttgcgcttaaactccgcgatgacctcgcccgcagccttgctgagcagcaggaaaggaatatacggcttcacgacaggagcgtgtttttcgacaatctgctcataactcaagtcggaaataatggcatacttctctgtacccgtgtagccggggtattcgtatttcagcctgatcaccttgcagtcagccttgaatgcttctgtcagggcgtcaagatttaatgtgttgtcagtcattttcgtaatctcctttgaattttgaatttttggttgaactcaaaattcggagatcacggatattcagctatgtaacaaagccagttgtataacataaaaggagcttcctttcagagatttctctgccggaagctcctgctcggttgtccttgccgaaaaaagaagccaccggcaagacagaattagcctgtggctatctgtcttgtcggcggcctctcatgtctgctgtcagcaagtctggcttaacacaccgaaatattcaaagcgtgtgacctgataaggatttagtgcggctctgtttcagcccgaccttaccgtcgttacgccgtattcagttttgtatcgctcctacatcagagcctcttgcccctgtgcggcgaacagctcaatcgtgtcgtgccgcctgcctttcggtacccggacaaactttacggtgcattttctgcactcatagcggatcttctcatcttcacttttgtgtccgtggtttattgctccgcagttcgggcagaacatcgggtaggttttccatccttttttcaatcctcagtcacctcgttctttctgtataatattcgcaatcttgcgaatattaagggtaaaaaaatcccgcaggattttcatatcagggcaaactccttcaggcgtatctccattgcctgtttggacacctcaaagatttccgccattttgcagacatactcgctctttgaccggcacacgggtcggagtgcgtaaaagcagcgtttgacctgtccatttggcatcaggatggctttggcaaggtaatttgcctgccattccgtggcgtcctcatcggcatcgtggttatacaaagcggcggcaacgcctgttccgctgaagatgcgtttatgaatgatgtgatgtgccagctcgtgcgccagcgtaaagcgcagtctgccgtagcaccgttcatcttcaagaagcgacgcttcgattagcatggtgccgccctccacgcgcatcagggcgtagtcgcctctgtcacggtcgtagtaggtggtgatgccgctatcgtagatcattctgcccagttcacgggcatcattggttagatattggtattcgattcttaatccgaaagtcttttcgatgattgtttcaatcggcactgcacgggggctgccgttcaggtacattggatcatattcatttaatgtacggcgggcaatcgtttcaagcgcctgcggtcgatagaatactgttgccactgctgcgtcctttctgtccgaaagattagtcggactcttttgtaatgcggcggataaaatcttcccattgcttatccgttacattatgctttttggctgttctgagcgcagcacgaacgatgtccttttccatgatgtattcgggcaggtctgcgctcaccgtatgccgcgatcttgcggcaaggtcgtacatttcctccgtttcggcttcattcaggtgcagaagcagggggagcttttccagaatctcatcgggaacgggtctgcggtttttttcgatgtcgcagatatacacggcggagaagtccagtttgatggcaagctgccgtgcggacatttcccgttccatacgctttgcgatcagaaagtccccgaaggtctttgctctgttcatatggcggctcctttctcggttcgcttttttgcgaacgccgtaagcatattatatcctgaactttttacgaatacaaggggtttcggcaaagtcaaaacgagatgggcgtttttgcacccatctcattttccgaacagcggcacagcctatgtctgcaaagcatttttgagcatttccccatattgcaaaacaacctcttcgggagctgtgatccgtatatctccgttgaactgaaacacccatgcgaaaaaagtctgactgacggaaacctccgccaaagccctaaagtgtccgcagtcacccggaacggtatctacctcatcaccgaagcggtctacgatataattcatcagatcgtttttgcagaccagcgtaacctttttggtttcaccgtcgtacatatcgaacacacggcgggtaaattccggcaggttgaaatcggcgggcttcgctgcggcgtcggcggaaaggatttccacctccttcatccgatccacccggaaggtgccgagctttcggtgcttttcgctgtaaccgatggcatagtaatgatcctcgttccataccaaacagtagggggagaagaaatatcgctttccatcgttattggggacttcttttcgatgttggtcgtagtgaaagtaccggaacgaaatctgcttccctcggttgattgccgtattgatattatctaccaaatagtaaatctgctcgttcagcggttttactctctcggaaacatacagattgcttttcagctccgccgcctgatggatgctggtcatctgcgacagcttttcgatcagctccgcgcttttctttaccgtgatgaatttggacgattccaccgcatcaatcagcagtttcaactccggcagagtaaataaatgactactcagggaatagcggttctcacggcttctttcttcttcaatatcaatgccaatatcacagagcttcgcaatatcgcccggtattgtttttctgtcgcaggaaatgccgttgcccttcagaaaagcgaggatgtccgccgttgttgcataatgctcggcatccgtgttttgccaaaggtatttcaatatgtataacagtctgctcttggattctgccatagcgtcactcctgttgttttttgcggaagcccttatttctttgagcttcttttcagctcgtatgtcccgccgaccgtgccctcgccaccgatcaaggtaagggtatttccgtcaacggtaaattcatattcggaatcccgcaccgactcgttggcgtaatcgatcatgagcttgttgccgtcgatggtataggtgaaatcgtaggatatggagggcagctccattgcgccgcttccgctgccgtcaaaggaataggtggtcgttccgtcgaactcccatgtgcctgcaagtgcgtccgtgccgccggagcagccttttgccagcagtataatgccaacgatgattaccgccagtgcggcgatcgcaccgcaaagcaccatacggcgctgcgtctgttttttcttcctttttctgattctctctaccgttcgatctgactcgttcgggaatcgtcccggcggttgctgcctgacggggcggttcgattgataatcctgcatcatgtggttcttctccagtccaagcgaaagggcgatgacggcaatgtccgtcaccgccctttgctcaaaggttcgcagctgatttattcagcgttttctttcttctttttgctgtaaacggtgatgccgatcactacgccgccgctgacaaacagcagtgcgatccagaggatcatattgctgttgtcaccggtctgcggagaatccggaccagtcggcttgcccggctcagtcggtgttccggtagccggaatctcaactgccgccttcttgtagccgcaaaccctgcactcctcatgcttggagcccttttgcgttgcggtcgcttccttgtcaacaacccacttgaagtcgtgtgccgccttatcggccttatctccgcaagagcactcatgccagtggttcgtagcatcgttcttccagtcggagccgtagctgtgagtatgctcaccgccgccggttgccgggatagtttcggttgtcatcgtataaccgcagacggtgcattccttatgctttgagccgtcggttgtagcagttgccggggtgtcgatgatccattcgccggcggtatgcgctgctgtatctttcttatcaccgcaggagcactcatgccagtggttgtcggcatcgttcttccactcgctgccgtagctgtgagtatgctcaccgccgccggttgccgggatagtttcggttgccatcgtataaccgcagacggtacattccttatgcttttgcttatgtgtgataaagaagtaatagaagtgtaaaaaattttgcctttcctatccgatacttgtctttggtatcggatagggcgggcggtcattcgggcaagtccaccttgccgacgaaagaatagtaaatctcaatatcctgtctgcgtgtgccgttttcatcgtagctgcactcatgcacaacgattttctctacaaactcacgcaagagggtgtgggtcagttcttcaaagttcatgtgcttgcggacaatgttcataaacttttctgcgtttacggtagcttcctgtgctttggaaagctccgcctgtattctggcaacacgctctttcaattcctgctgttcggcttcatagtctgccgaaagctccgtgaaacgctcgtcagaaatgcgaccgcttacgctgtcctcatacagccgcttgaaaatagcggaaagttcaccgatacgcttttcggcagcttccagttcctttttcttggcggcgttccggcgtttgccgccgtcctcgttctgctcgatcagcagcttcataaaccgggcttcatgctttgccgcatagctcgtcactttccgtagattggagagaacgcccgcagtcaaaaggtcggtgcggataaaatgtgcggtgcagtcatgggtgcgcttcttgtagttcccgcagatatagcagtcctgtttccgcttatcggtctggtaacgctgctgatacatgacgctgccgcagtccgcgcaaaagagcataccagagaacaagcccacttcatcatagcggttcggacgcttgcgctgtttgcgtaattcctgcacacgctcccatgtctgggtgtcgatgataggctcatggtggttctcgaaaattgcctgtttctcaatgggattttctatgctgtgcttggtcttgtaggacggtttctccgtcttgaagttcaccaaacagcccatgtactcccggttttcaaggatatgcaccacggtatttgtcgcccatttgcactcatagccggggtgatagcggcgtgtgctgcccgtcctgcggtattccagcgttcccggcgttgggatttcctgctcggtcagcatacgggctatcttggtcggaccgttcccggcaaggcacagacggtatatctgcttgactacgggtgcggcttcctcgtcaatgatgaaattttcgtcctcgtccatgaggtagccgtacacgggtttgctcgtaacaggcttgccgctcatgccttttgaccgttttacggctttgattttcttgctcgtatctctcaccagccattcgttgaaaatgttccgcaaaggggcaaaatcattgtcgccctgtgcgctgtccactccatcgtttatggcgataaagcggacgcctttttgtgggaaaatcatctcggtatacattcccacctgcaggtagtttcgccctaaccgtgacatatcctttacgataacagtagccactttcccggcttcaatatccgcaagcatggattgaaagcccggtctttggaagttcgcaccagaataaccatcgtccgtgtaccagcgcagattggaaaaaccgttctgctttgcgtaggtttcaagaatacgcttctggttggaaatggaattgctttcgccttgcagctcgtcctcatgggatagtcttggataaagggcagtgattttctgggtggtctgtcttaacataaaatcctccgtttccgacagccagccccactattccgtatttcgattataccacatggggcggctgtctgtatagcggcttctgcttctttaccgcctgtcaaaatgacgattttttactgtgcggcttgtagcgttagggcgaaagctgggctttgtgtcctgcggcggcttccgcctccagcactttcatcatcttatcggctgcggtgtcggtggtatcttttttgaaaaagccggaaacgataaggacggtgttgcccatgcggatctctgtcacgcagtccgggcggcgttccggggtggtgttctgcttgttctctgccataggcaactcctttcatttcatcaattcttttagtctgttcagcttggcttgcgccgtttcacggcggaagttctctcccgtaaagaggataggggcgcacatttccaaaaggcggtcataaatccgggcatgggcggtgtccagcggattttgcaggctgtccaatgtcagattggtggtaacgattaagggcttgcggctgcggtagcggctgtcaatcacattgtagacctgttctaaaccgtactctgtgccgcgctccattccaaaatcatcaatgataagcagaggaaaacggcaaagacgctcgatatactcgttgcgcccctcaaagctggcggtcaggtcattcaaaatcgcagagaagttcgtcatgcggacagcgacttcctgctccatgagggcattagcgatacaaccggcaaaatagctttttcctgtgccgaccttgccccatagcagatagccgatattttcctcgcgcatgatttcccaatgctccacatagaagtgtgcaatctccatttgcgggcatttcccgttgtcgttggcgaaagtccattcctgcatggtaggattggtaaatccccggcgtttcaagtcctccacggtgtcaaggtgctttctgcgctgttcggcggcttcacgctccaaacgctgggctttctggcagtcacattctgccgggtggcggtcacgcccaaacaaggcggcttgcttttccgggaagtaggcttctttcggagtgtgacacttgccgcagtaaagcagtccgtcctcgcccatgtagtcctccggctgtggggtaacagccgtcatattcaaaactcgttctgtaaacagattactcataagctctcgccctccttgcaggtgtattcgggtatgccctgtttcggggcagcctttgcggtatcgtctgccgcccatctgcgaatagtggcggcgtggtttttatatttcttgcccgtggacgcgatatagccggaaagccgctcaatatagtacgcccatttttcgggcagctccgcttgcagttcggaaagctccgtatcagtcagaaatacattctcatatctgccatagctgcgggcgagggcttgtccctttaactcttcctctttttctaactctatatctatctctttctttatctctatctctggtggacgaatgtcggacaaatgtccgccatttgtccgcggcggcaaaagtgccttattttcaagccttgcggcgcgtttccgttccgcttcggtagaggattgaccgatcatcagctcgatgtcggtcatataaagcagcccgcagtcaagctgctccacaagccctaactgctggaagatggctaatgcccgttccaccgtcccgatttggtgacgggtcagcgtggctatcatctgggcggtataggggatatgctcgtcaagctgcaatctgccgccatttttcagcgattttaagtacagcttcaagaggatattggaatacaaaatcccgtctttcatgtcctccaacagcacaatggaatcgctgtcgaagaagttttctttcagtttgaggtagtaatatttgcggttatctgccattggcggtgtcctccctgtgtttccatctcttagagaaataccgggggcagaggacgataatcgcccggaagctctgcttgcagccgtgtgtgcagccccggcaaaggtcattgtaggtaatacggtttcggtggttgaggaaaaagctccattccaaccgccgctttttgctcatacgtggcatttctcgctcctttctgccgtttccgctggtataagcggataggtcggtaaaaatgtagtttctcggtgtcattttcggggatttcctgcgctgtgcgccccgtttcaaaggtgggcagtattgcggatagggtgcagggcatatccctgttttggtatcgtttcggggcggtttttaacgctcatgttcgtgctttttctctctgtctttctcgccttgcaggatttgagaaagattgcttttcacggtatgcagctccttgacacgggcttttttctcccggtattcgttgtaatgggcgttcttttcggcggtaagctgctcgatttccgcttgcagggctttatggcttggcagcttggaaacgccatgcgcccggaaataacgggtggctgcgtccgctatgataaaatcgctttcgtgccgttcccgataggtgctgcgggctttctccgttttctgtgctttcagaccgtcacgggcaggcttggtcttggcataggcaagcacctgtgtctgaagctcctttttctcccggatagcagcgtccagggctttcagcttggcggtgctgtcctgtaaatccgcattggcagataccagggctgcgtccagctcctccggcgaatagccgtactgcccgtaggcggcaacggtagccgccatttgtttcagattgtggactgccgcccagcggtcatagcccgcgccctttccctccgctcgcttcgctgcccggtcaaccatgcgctgaataccgtccttttccggggtggtttggacagcttttttgccctgcaaacgctcccttatgttgcgggggtattcgggtacggttgcggtctgctcggcggctctgtgggcgttctgttccaaaagggcaagaacggcagcgcggtcaaaatcatctcccagcttgcgggcggtaatgggctttgtcctgtccggcgtgaggtaggatagccgccctcggctctccttgacagtcacgccctgttgcaagagaacggcggcgaactcgccatagcttgtggcagaggacagcgcggtgcgtatggcctgccgcaatttttccttgtctgtttcaaacttcgtgggcttggctggctgctcctcggctggcaaggcggcaacttccttgtccagctttgcctgccctttccgctgcgcccaatactcacgctcggtaatgcggtttttgctgccatgcaaaaggtcgatttgatagagattttcccggtggcacagctccatgacttcggctttgaagtattccatcgccgcgtctgtgcagcggtgtttgcacccggcgcgggtgtctgccggtctgtccatgtaaggcaggaacggaacttcctctatccgcagagaattgataacgatatgcacatggatattgccgctgtggttgtgtccgtccgggtgggtgcagacaatggcttggtgtccgggaaactgcttccggcaaaattcctcgcccaacgcctgcgcccggtctacggtcaaaccgttgtccaccgcgtcccgtgggtcaaagctgataatgtagtggtggctttttacatcttcccgcttctggttcttcccatagcggagattggagcgcatacaggcaacggcaaaatcctcgtcgccgcagttcagcgtggctattcgatagtcctctctgagcatgagccgcccgttttcatcaagggtgggcttcatggtaaactcgtcatgttcaaaggtgaggtactgctcggctgcgccataatccgcatttttagagctgatatgtttgaatgttgccaacagcgtcacctacctttcgcaggacttcaaacttcaaggcagcaaggtcagaaatggcggcgcggacttcaacggacagggcgttgtatggtgtgccgtactcgttgagggcgcgggcaatctgattgaggttgccaccgatttttccgtattcggcggtcagcctgccaacggcggacaacagttcatcattgaccggggaaacggtaacgatgggacgaatggtcgcccgtgtaatggcttgccggataaattcggattggctcatgtcatagtgtttcagccgctcggtaaagtcggcgtattcttcctcggtcatgcgggttttgaccacatggcagcggtggggtgtgttatattttttcttcaagcgttgacctcctttctcgcccgacagggcgcatgagcagggtttggggaaggcactccccaacaagatttaccaaagggggcaaaaccgcagatatgcggattttggcaccgtggtagaatcttgctctaaaaaactaccgctttcctcggcggctctggtttgcggatatactggcttgctccaccaatatagcgattgcggtggcgtgttctgcccgctgttcaccactacaacggtgaaaagggggcgttttggcaaacgcagcggaaatttttttgttttccctgtctgctccctacaacaatccggcggtgtggtttgccaaagatttttgaaaatgggcgcaaaaaaagcagtaaaccttttcaagatttactgcttatctgccgctgtgatgggtggcggtattaaattgtcagccgtttttcaaatggaatttatctgcaatcgctttctttctgctttccaattccttttctgtaatcttccataatcctaacgcaatgatctgctatcttttgcattccgagttcttcaaaaaaggcaatttgtattttcatcagttcttcacaaacagtcaacttctgctcatccatattgctaatagcaagccatgggaacgctttatatttcttagtgtccccaatgagaaaattgtaccctatcaactcattttcacggaaaacgaaatagaattgtgggcctgaacctggaactgacttttccataatttgctgcattgttctcacgccgccgtatgccggaaaaaaacctattcgctcaagagcatttaatatgtcaatccttttatctgtgggtatgtctctataattgataatctgttccatttgctctaccctcattgaagtttaatttgtcaggctctaattatacaacttttctgtttagcggtcaaagcggaacttcaacaggctttctatcagttgcctgacgatatgctcctgcatatccgtgttaatctgtccgtccattttcgcacaagagcggatatatcccgcataatgggataggacggcggcaacagcttccgggtcgccctcgcttgccttaacgattgtctcatagggaagtagctggctcataggacaaaccctccaactctgcccgtagccgccgtaaaatcatctgaatacgccgcccggttgtgttgccagcccgtccatatctccgtccaatctccctatgcgtcaatcgttggaagtagtacaagaaaatgatttcctgttccatctgtgatagtgcggacagggctgcggcaagctctggactttccaaaagcaccatctgaccacagacgaaaagcggatagctggtcatgccggattgctccgcaaagtatttatctgtggtactgaatggatagtgtttttcttctatcagatattcaagcgagatttcccgcttgcggcggctccgtatgctccgggctgcgtctatggcagcgtggcgaataacagtcttgcaaaaggcatcgtgtgtatgccggatatgttcttgatacttttcgtgttcggtcatggaaaatccccctttctgaataatggcagagggcggcagcatcttgtgctgtcgccctcttgattaccgaacagcaaagacgggcggggctgtcaacggcggcgcatttgcgccgttcatcttgaccgttgacaggctcggctgggtttgctatctgctcacggcaattcactctcattgataggaattgcctcaagttccgtattcaaattgttccaataagagccgatatccgcacttgtgaaatacttaaaaccgcctgctgctgacttcaattcgccgtttttaaccccatagcaggcgtaaatcaaatcgtagcttgttccatctgagaggttaaatctaaagctggtcacatctgctccggcagtttcctcagtcgttttgtcttttagggataagcccttgaacttatcatacagggtctttatatcattttcagcaacaactactttcttttctgctgatgcaggcactccgtcatagtggtacatttcaacgttttcgacatcttcaacctcaaatgggaagttgattttgacaggctcataagcaatgtttataggtaacagaaagagagctgtaaaaattgcaatgatacaaagagcgatggaaacgagaacagcaatcgttatcttttttctgcctctctgcttttcttttgcctcatggcgcataataacgctttcgctttcttcgtgaagaacatcttcgctcgtgtgagaaagcaatttctgataaattgcgttacagtcagcacaggcgttcaaatgctcttttaccatctctgcgcttgcttcgctgcaagcaccgtcaacatacagcggaagaatatctcgaacaatatcgcattgtttactcatgcttttcatccatcctttcttgaatttttagctttgcacgatgataagtaactctcgcccatgattctgtttttccaaaaattgcagcgatttgtgaaaaagatagttccccgaatacgcgaagctgaaagacttctttgtatggttcttccaaacggtgaagaacgaggtgtatgcggaacgccatgtcagaatctgcaactgagttctcaacattttcatttgatggcaagtcattgatttcactcacatcagctactcgctgacggcttcgcatttcatcatggtaaaggttttttgctatggagcagagccatgtcaattcatctgacttacctttgaattgtgatgttgtagaaacagccttatagaatgtgttctgcgtgatttcctctgctatctcacgatttttggcaagagaaatagtatacgagtatacctgtaaatagtaggctttatagagcttttcatagtccatacttgtcatcacctccttcagcttcataggttagacggagaaatcggaatttcgttacaaagaagtttgaaatttttatacctttacgctactcttgctttgtgcggactattggtagacgcgcattaacggcaagtaaagagattgctgtgtcagcttgatatgttcaaatgctaattaagtatagcatacagctatgaatttttctattgcgttcccctgacttcggaatagtggcagggctggctatccttgttttgctttgtgcttctctaccgtacatgagcattgagccgtcggttgtagcagttgccggggtgtcgatgatccattcgccggcggtatgcgctgctgtatctttcttatcgccgcaggagcactcatgccagtggttgtcggcatcgttcttccactcgctgccgtagctgtgagtatgctcaccgccgccggttgccgggatggtttcggttgccatcgtataaccgcagacggtgcattccttatgctttgagccgcttgtggtagctgttgccggagtgtcgataatccattcaccggcggtatgcgccgccttgctgccctcgatgatcacgccgcagccgacaacggtgcactctttccagtgatcggtattatcggacttccagtcggaagcgctatgacctgttgccgcaaggattacgcttgtcttgtcggtaatttcggatgcaccggttgcatcctcaaaccacttgtcacagccgtcgcaggtgtaatatgccgtgttgcctttctccgtgcaagtaggagcctttgcgggaacgagggtcagattgtgcgtatgcggtacggtcttgtcatatccgcaggtgtcgcagatgttatcgctaccgtaatcgtgagccgcctcgtccttcttttcgtggcaacgagagcattctttccaatgattgtctgtgtccttgctccaatcgcttgcccatgcgtgcccgagctgtgtacctgctgctgtaaaggtttctgttgtgctgatctctccgcaggagcagctcttgaaatatactgcatcgttggtgcagtcggcagccgacttgagggtttccggcttctgaatttcctgatcgtaggtatgggtatggggaattgtgtaggtcgctttcacgctgacttcactgtcaggcattatgaaagtagtggtttcactgttcgcatcttcaagagtagtgttgccgctttctactacccacttatcaaacaccttaccgtcaggagccgcatttgcggtcagagtaatggttgtgccttgcgccgctttactgatttcgcttcctgcaccgattgtcgctttgccgtccgttacgatgatggaatactctttactctcccagattgcatagaaggtagtatccgagcttacttcataggtcgtgccggaaataaccgaaccgtcggcactggttgaccagcccttgaattgcttgccttccggttcagtaaaaccgcaggagggcagggtgtagctgccggaaacgccggtgacatctgccattgtgccgccgccaccgttggcattgaatctgacgatatactcggcaggcgcggctttggttatcgtaatagacagctccttcgtatcgctgcccgcgctgttggtagccttgacggtgaaggtggaggttcccgctgcggtaggcgtgccgctgatctcgccggtgtccttgttcaggctcagaccggtaggccagtcgccgttttcaacgctccatgtgataggcgtagtgccgtcggcgctcagggtctggctgtaagcctcgcccaccttgccgtccggcagggtgtccgtggtgatggtaacggtatagatgccgggctcaaactgtgccgtcagcttggttacatccgccgaaacgctttcaccgggcgcgtacaggtttccgtcgctgccaaaccacataaagtagctgccggtatctccgtcggggcgggtcagaccatcggatgcaggcgcagtaaattcgcttccgttttttacaatgatctggatattatccgagctgccgcccaatttgccgccgccaaggtcaagggtaacggctttcagcccgtcagagctcagtgtgtccggattcaggacctcaaggacaggacggaaaccgatgcccgagcgggaccacgtagcattccagtcgctccagttgcgggcggaattgtacccgcgacgcgcacggttcaccaacaaagaactatcagtatcctgcccccacgaatgcacctcaccacagtttttgatatatccatcgtccttgtccagtatcctgtcccattcgttgctttggggcgtgccgcgtcgggaattgcccgagcctgtaccatcacttcccgtggacggcgcacgcagcgtatagcttatgccgccggtggcgtaatttttgccaaaaatcagacttgcgtcatccaggttatcccatcctactgtatgtgtcacgacataatccgccacaaacaggctgtgtgcatatttgttctgctgtgcatactcctcggtggttaccatctccgacgtgagcttgtaggcatccactgtcccggcataggtaaagggaacatagtgcagcgacgtatccggcagactgctgtttgccgtgccggggatgcccacgccggagaggtcaaaccaataggtgtcgccgatcgtaagagtaaactgctcatcaaactgcgccgtcagcctggttacatccgccgaaacattatcccccggttcgtagagcttgccgtcgctgccaagccacataaaggagctgcctgtatttccatcggggcgggtcagaccattggaggcaggtgcggtaaagctcccgccgtttttcacaatgatctggatatcctccgagctgccgcccagtttaccgccgccaaggtcaagggtaacgactttcagcctgtcagaacccatcgtatcagggttcaggacttcaaggacagggcgaaaaccgaggcccgagtgggaggtcatagcattgtagctgttccagtagcgggccgaaccgtacccgcgaagtgctctgccctccttcgtattactcgcagtatcctgcccccacgaatatattgcgctccagtttttgatatatccgctgttcttgtccagtatcctgtcccattcgttgctttggggcgtgcagcgttgggaattacccgagcctgtaccatcgcttcccacggacggcgtacgcagcgtatagtccacgccaccggcagcgtagcctttgccgaaaatcagactcgcattgttcaaggtattccaacttgccttatgcgttacggcatagtctgccacgaacaggctatggacatatgcgttcttctgtgcatactcctcggtggttgccatctctgatgtgagcttgtaggcgtccactgtcccggcgtaggtaaagggaacatagtgcattgtactgtccggcagtgcgtcattcaccgtgccgggaatgcccgcaccggagaggtcaaagtaatagacgccgccgggagcgaggctgaactgctctacaagcacaaactgcgccgtcagcttggtcacatccgccggaacattatcgccgggcgcgtagcgcttgccatcgctgccaagccacataaaggagctgccggtatctccatccggacgggtcaggccatcggaggtgggagcggtaaagctctcgccgtttttcacaacgatctggatagcttccgagctttcgcccagtttaccgccgccaaggtcgagggtaacggctttcagcccgtcagagctcagtgtgtccgggtccaggacttcaaggacagggcggaaaccgaaggccgagctatgccccacagcaccgccgtaatgccagcggcggttcgaactgctcccacgaagcgcacgctgcgacgcaatatctctcgaagtatcctgcccccacgaatacatccatttccagtttttgatatatccgtcgttcttgtccagtatcctgtcccattcgttgctttggggcgtgcagcgatctatacctatcttatcacttccctcggacggcgcgcgcagcgtatagtccacgccgccggcggcgtaacctttgccgaaaatcagactcgcattgttcaaggtattccaacttgccgtatgcgttacggcatagtctgccacgaacaggctgtgggtatattcgttctgctgtgcatactcctcggtggttgccatctccgatgtgagcttataggcatccactgtcccggcataggtaaagggaacataatgcattgttttgtccggtaaatcatcgtttactgtgcctggaatattctcaccggagaggtcaaagtaataggtgccgccaggagtgaggacaaactgctcggtggctgcctcctccaccgtcagcgctaccgtctgaaattggctggcgtagtcagtctggtaatcaccgttacactgctcggaaaacacatggagtttataatttccactggcaaggtcatgcggcagtgtaaagctgagctgcctgtctgtggcagtgggcttcataatccttccataataggtcgcaccgctttcaccctcgataatcgcagaaatatattcatttaaccccgttctcggcccggaaaaattcagcgtaaccgtgccgccgggttttcctgctgcggtagtttccgttaccctaaaagtacgggtatcgtccaaaagtgtcaatttccattcgtccccgctgtattccgggattttgaacattccgtcagcagtacctttgccgccaacggctgcagaaacgaggaggacagagtccggcttcaggttgaaggcagggcgggcggcgttggtttggcctacccattcaccgatcacagcgcccttttcattgaccgtccccgcagaatcagggttcattctcctaggagaacggagccaccatacgtatgcactatcgccataattggcgatacgcgcattgtcatcggtaaatccgtaggctgcattttccgcttcctctgccgagagaaaaaacaccttgtccccatccaggatgttgtcagaagcgtcatagtacataccatatagagcatcacttttgctggttgccaaaacagctttttgctccgtaatgctgagacttctgctgtaaaagtcattacaccagtcctgcccacggctgcccttccagtcgttgaaatatggggtcgtataatcaaattctacgccgccatattcccctgtcccaagcagcacctcggagaggaggaaaaatccgtcccccctctgggcattggccatatttgtttttgtatccagcacacgccatttgacggtgctgttattccatgtgccaaaatgaatatagtcatagctgctgtttgtactgtcataaccgctgatcccacttgtgccaatctgtatggctttttttacactgtcattatcggcaaaggcggttgtgggcaaaagacccaataccatgcagcatatcaccaggatgctgagtattcgtttcttcattggcttgtctcctcctgttcgtatcggttcggcttgtccgtcccgtcttttttctggttttctctgattctgagccggaaacacaggactgtaattaccaccgctgccgcaaaggaaacgatggccaccagcacatagccgcccgcgtcctcccgaagaagcatcgtgccgaacactccccttgtggcagtctgtcccttcccgatgatcatgcccgccgcctgcatcagcactgtacacagcagcatacacgcggtgctcaatctatatatgccccgccgctgcctccggcgggtgttttcccacacccgctgtttgacgagtgcgacccgttttgcggtatcgtacatatcctttgacccccttcccggtttgtctgaaactgtaataaaaaccctttcacttatataggtacaaaaaatcgaaaaaactctcaccaaaaacgaaaaattttttaaaaaaatttgagagccgccaaaaagcagctctcaagtagaggatgttcagttattttctctgcgataatcggaaagcagacaatcttaccgccgccaccagcagcaccggcatggcgtaggcgatgtactgcaccgtaccgccgtaggcaatcagcagattgtaggtggcgtggaatgttatcgccgcacacagcagaccgcaagtgccggccaccttcagccacgtccgctgccatgtgtatgcaagaccgccgcctacgatcagtccgcagaggacatgcatggctcccgtgccgaagccccggaagaaaataaaggaaaagcggtccgctccgttttggatgagatagcagacgttttcaaaggtggcaaaggctagggcaaccgtgatggcggcagccttgattttattcccctccggctcgaacaccaaaagatagaacaccagcggcagcagcttcatcatttcctccaccaccggcgcaatctccgccgtggcggcaagggcgtccgcccggcataccgccgcaagaaaggtgttaatataggccgaaagcaggcacacccccatcccgacaatgcaaaacaggaaaaagcgaagctgccgcctgcccatgcacagagcggctaccagcaggggagagactatgcagagaaagatgttttcgatgtaggtcacgcttccaccgcctttctcgtggcgggcagcagccccagaatggccagcgtcagcagcatatcgcaccagaaggtgggacttgccggagaggtatccggccagaagcagcccactgtccagagcagatactccgagacgacaaagcacagcacgctgatgtggaaatatcgcatattccgcgccgcgcctgtctgcgttttcgcatagacaagcccgcgaatggcgcagaaggagagccataccatcatgccgcaccagatcaggttggagagaatatccccgaagatgcagtagaacgccagcagcggcacgccgaacgcaggcgcaagccatgctctgcggcagcggaagctgcgctgatctgctccggccagcgtggcctgcaaaatgcgcagaaagaccacgctggccacccagccgaactccgacacataaaagacccgcggcgtggtatcgaacagcagcagatacagcgtccagtagagagagccgagggcaaagcagccgtagaagcacagcagcagaaaatacgcctgccgcccgcttttccggtaggcgacacccgagagcagcgcgccgacgaacgtgaccagcagttgcagcaggttctcaatcagctccatgcgcatcctcgctttccttgtcctgcccgtcctcacggctcatctgccgcagccggaagcacaaaacggtcacacacacgccgagtaaaaacgccagaagtccgatgacgatgtatcccaaggccgcgccgccgtgaaagatgcttgccgccgtttcaaagccggaataatcgcctgtttggatgctttcggcaatgccgggcatggcgagggacgcgccgatgagcagcacaaggcacgccgccacggcggaagccatagtgaccgtattgcgccgcagccgttttttcctttccattgcagcaatgcgccgcttggtctccacgacccgttcctcatgactgcgcatttgtgatcccctcccgttccagcagccttcgcaggctctcttttccgcgatacaccatgttggtgatctgcttcaccgtttttcccgtgacctccgccgcctgcgcgtagctcatgtcctcaaaatagatgagatacaggacttcccgatagtccgggttcatttcgcccatgcagaaatgcaggacgcggttgcgctcctccgtccgtatgacctcctccgccagcaaccgaccctccggctcctccgccagctcgtccagactgaacaggcgtctccgcttgctcttgcggcgcagcgccatgtgccgcgccgccttatagagatacgccttgaagccgccgccccgtatcttcggctttttggtgaacagataggcgaaaacgtccagcatcagctcctccgcctcgtgaacgtcgtgcagatagccatcgatatacagggtcagggggtcgccgtatttttccatcagggcctccagccccgcgtcatcgccgctaagatattggcggtataagctctcgtcgcaggtcataacgttcacttcctttttgcggatgcttccaatgcagagggggatccgtcaggtgcttgtcctgccggatcacggtgctgtccttgaaagcgcgggtcggacggcttttccgcgttttccgggatcgcccatgaacgcccgaaccgggacgcgccggggatccgcccctcggcgcaatactgattgacccgacgctccgacacgccccaacggtaggacgcctcccgaatggagatatagcccttgatcccgttcataccgcacctccgcatggataatactcaacacgatacattatatacgaatatccgaataaaagcaagcccacacggacgttggttttaacgaattgtcgcattttcctcacatcagggtatgtattggctgccctcgcaggcagccatttccctcttttcgtgcaataccgtgcaggctaatactgaggcactccgtacccaagcacctcataatgccctacgctgtactgattgacacggcagctatcgcctgagttaccctccacggtatagacgatgccgttttcaaccttctgcacaatgcctacatggtcggactgcccgtcttgcggaccggagctacccttgttgtcccagtcaaagaagataatcattccggaaacaggctcagcagagccgtcgatccactgtccacggtctttgaaccattgaacgccgttgacgcagcctgcaaatttcggaattacgccggtttcaatatatccgcactcgttggcacaccagctcacgaagcaggcacaccactccacacgggaaccgaaaccgtaccaagaccagtaaggctcgccgcctacattgcccacctgcgacaaggcaacggtcacgatctgatcatcgctgtatcggatgccgtagaggacagccgcccaaagggagttgttcttgtcctccagcagctccgcaagatactctcgctgttcttcattgaagccgtattggtcagccatttcctccaccgtcttatgcgacaccgttatatacagtgtcgttctcgtttcggtggtttcggtctgcacgatatttccgttaccgtcatcggtttcggtgatgaccgtttcagaattgctttctgtccgtgacgatatgctgttcatctcccaaaatatatccttgagaagctgctttttggtgtcgtccatcgtggcaacctcctgcgggttgtcaggatcggtgttgaccttgaccgagtaaaccgcaagtacctccttccatacggcacggcttcccgacatttcaagtgtatcataagaagtgccgtttcgtatccccaacagccggttgtcgtaatccgtgttgatctcctgcacggctgtccgcatggactgtcccgtgccggaatcctcaccggagaagaatatcccaaacacagaaccgcaaatcaaggcaatcaggcagatgacaatgataaccacaacggcgacccagccgccggcggcaatggccgctaccagtgcttttgctgccgctatgatcgccttgaccgccgcaacggttgctttgacggcggctttcacaccggctgcggtcgccttggctgcggctttggcggcctgcgccgctttctgtgaagccttaaccgtcgcctgtgcggttttctgtgccgtctttgccgcctgccgggtggttttaatggcggtctttgtggtcttgaccgatttctgcgccgctttcgtcgtgcctttgcctactgtcttgacggttttctttccggcagaacgggcggattgcttgacggtcttttccgtctgctccaccgtcttaatggtcttattaccggaagcacggacaaactgccttttcagcgattccgccgcccgcttttttttgaactgcctgatgctgtcctttgccttggatacattccgcttggtttccgccagccccttgcgtccctgcttatcgaactgatgcgccgcttcgtgggtcatgcggtctacgccgccctcgatgcggtcggaggcgtattcctctgcgctgtgttcttcgggatgggcggcgtgttccgccttctccttggtctgcacataggcggagcgcatacggtcggcggcaatcgccgccttgtctatcttcttgatcgtgcctttcaccacatctcttgttttgattttaggcattttccctcctttccggggcgcacccaaacgcccctgaattgaaaaagaggggcaaaggcataaacaccttacccctcaaagtgtgggagctgaaaagccttactacgactgattttttcagcccctatttttcgactctgcccatttcctgcgggcgtactctgtctgctgctttttgtaggctcttacggcgcacttgccgcagtatttcttgcgattgcctttcttgaggatgggcgcaccgcaggacacacatcgttcaaagcgtgtgccgagaatagctgcctccagcatcggctctgccggcaatacggcattgcggaaatacttgcagagcagcgaataggaaatgctctgtacacagacgcaaggctcaccgtcatccagcacaagacagttgccgccgtcatagttggcgcacaggcgtttaatcaaggcgttggctttctgccgctgcttcggcgtgagtctgggcagcatccgcatcaccgccctctactatacgctttgccaccaccacaaggcggctgttgttgcggctgtactcgcaggtggacagggtaatgagtttatcgccatatgcggcggtcacgccggtgtcgtagaaggatagctccttgcacttggcaatgaagctgtcaaactcgttggcatttcccgcatccacgaagcggtaatacttgaacgcgtcggggctgtcggtgtagaccaccgtgcggaacacggcaacgatctcatacttctgcctgtccgtcagcgtgttaaaagcaatggtcttatgcttgctccaaaagctctcgctcttgaatttgtcgagatgcgcgaacatagagccgtttttcatgtgatgcccgtagataacaaggttgtcagagggctttagcacatcgcagtcctcctgcacatagggacagccgtactcggagtattccttgtcaaagccgtgcttcaggtagaagttcggctcgtttacagactgcatcacgggatagttgatgttggtatccgcaatgctgatccagcccaccaaatcgccgttctgtccgaacagctcggcaagctccggcagcagcgtcttttcctcggaatacggaatcggctcggtgggttccgcttcggcatccgtctgcgctgcggcctccaccacggaggcaaggttgtgatataattccgcctgcttgtccgcctccttgttgtgccggacaatataaaaggtgcttgagccgaggacggcagcaaacaccgcaatgagaataattgaaattgtctttttcattggatttcctttctttgttgccagctttgtcaattcgcaatgtcggataatttggtggtcatcagcttgtagagctttgtgtttttggggaacttgttagcaaacggcacaaggctggagccgaccttaatgagtccgtgtcctgcgtccacattggtgatatacgaaagctgggtgtccgagatgttcaggagctttgccagctcaatgcggtcggtggacgcctgattgagcataatgatgaactcggagtttgccagcatcgttctcgccgtatggctctgcaagaggtcgtccacattctgcgtaatgccggacgcataagcaccgtactttcgtactcgcttccaaagcgtgaataggaagttggcgctgtattcatgctggaacaggagatagatttcatcaatgaagatgaaggtatttttgccctttgcacggttctgtgtaatgcggttgaggatggagtccaataccaccagcatcccgatgggcataagctgcttgccgaggtcaaggatgtcgtagcagatgagtcggttgtcggtatccacattggtgtgcttggcaaaggtgttcaaagagccgttggtaaacagctcgatggcaagggcgatctcctgcgcctccggctcggattgtttgagcagctccgcccggaagtcctgcaaggtgggaacctctcccttgtagtcgttctgctgataggcgcggtaaacgcttgccgtgcagcggtcgatgatggatttctgcactgcaccaaggttgttgccgccgatgagctgctcacacagggacataatgaactcggatttcaggataacggggtttgcaccgtcgccgtactccctgttcatatccatcgcattgatgtgggtgggcgaggtggcggaaatgttgatgatctcgccgcccattgcctttacaagctgcgaatactcccgttcggggtcgatgatgataatatccgcattgccggagagcatctgattgatgatctcgccctttgcggcaaaggacttgccgccgcccgatacgccgaggataaactcgttgccgttgagaagctgcctgcggtcggcaatgatcatatttttggaaatgacattctgcccgtagtaaatgccgttctcgtggtagatatcctgcacacggaacgggataaacaccgcaaggctctcggtggtgagggtgcggaaggtgtcgatcttccgagtaccgaagggcatcaccgtattcagtccgtcaagctgctggaacttcagcactccgaactggcaaaggtgctttcttgcggtggtcagcagggcttcggtgtcgctgtcgagctgctccttgctgtccgccgtgtgtaccatcgtgaggacggcgaacatcatacgctggtcacgggtggtcaggtcatcgagaaattccttcatctccttgcgctgctgttcaaggtcatagggaacctgtgcggagaagttgttgttggagttctgcctgcgctgccagttggtcacattggtttccacgcccagcaaacggttttccgcctcccgcaccgcttcatcggtgggaacgggaaccacatcaatggacagcatcaggttgcggttgaggtcagtcagctccgccaccatagcgtccttgatatacgacgcatactcacgcaggaacagcaccctgccgtagcattccccgatcttgaaatagtccttttcaaactccatcgagtcggggcagatgaagtccttgaagtcgtgtccctttttacgggtttccttcatatcaaagcggaagcaggtttcctcgcccgcacggtagaagtcgtggaagatacggaggcgttcgtctgcttccatctccgcgcacttgctgccgagcctgccgaagtgggcgatcaggtctgcgcccacacgggcaaaatagcttcttgcttcctccacattcttcttgttcacggagatggtaatatacttctcctgtgtgtaggcgtttgcgcccgtcgcacgctcaagaagcattttgttgtattcctcccggtactcgtcgagggcgtcgcccttgaggggcataaggatggttttctcgaagtccagccggttcaggcggcggttgttgatggtaattttggtggtcgccccgctgtcaagggaattgagcagctcggagtattcgaggaacatcgcctccttgtcctcacggctggcgacggcatagttgatgtcggtgaacttaaaggacttggtgaacttgtccctgcccacctgaaagataccgtcatcgtaaatcgctttgacgggaatgacatcctgtacgcccttgggtacgacgaagcgttccttgtcctgcttgagcaggatattcagtgttttaatcattggctttcaatacctccttcttcttgagttccataccgggcctcatcagctcaaaataggtgttggtggagcggaacacgagcttcttcggcagcagaaactccgatttgatccacgcccacacaaacttctctgcggtcattccgttgtacttaataaaacccagcgccgcaaagggtgcggcggctaaaatgcacatccacgataccgtttccgtgccgaaatggggcttgagcaggaaatacacgcccaccgcaacgccgcaggcaaggacagaaaaaatgaactgtctgagggacagtccaaagaacatcgcttccgtgtagttgcgtatttcacggttgatttttacttccaagatacagttcctccttcgtctgttggattcttgtttttgctgtctcgcagtattcggggttcagctcgatgccgagatagcggcgggagagacgcttgcacacggctcccgtcgtgccgctgccgaggaacgggtcaaggacaagcccctgctccggcgagcctgccaaaatgcacggctcgatcagccgttcggggtacatggcaaagtgaccgtaacccctatgggaattggtgctgacgctccacacatcccgcttgttgcgctttgtcggcagttcgctgtgggaacggggcagaaagagcgcctgcggctttgcgccgccgacaccctttgcgtatttcgtcctatcgctgaccgcccgcttgttgcgctccaccgtgaccggtgcgaccggctcggagatcgccgcagtatcgtagtagtagtggggcgatttggagagcaggaagatatgctcataggatttggtcggcctgtccttcacagcctccggcaggcagttaggcttctgccagataatatcgctccgcagataccagccgtccgcacgaagtgcaaaggcaagctgccatgggatgccgatcatatccttttccttaatgccgtcccatttctttgggagtgcggcgttctcatcggtattgaggctgtggtaggtctgtttgcttttggggcgttcggcaaggcttttgctccaaacgcccttgccgcttccggcgtagctgtcggcaatgttcagccaaagtgtcccgttgcttttcagcacacggcgcacctcacggaagatttcggtcaggcggtctatatattcaaacggcgtttgttcacagccgatctgtccctcggcaccgtagtcacgaagcccgtagtagggagggctggtgacgcacgtctgtacgtactcgtcaggaagccttttcagcatctccagcgcatcgccgcacaggacggtgttttgcaattcgttttggttcatcgtcttttcctttcccggcggcgtgcttcctcaatttcgctcttgcagacgcacacatcggcaaggcagagaaccctccgcctgcgtttgccgccgtagtaaagacagtatctgcaatcgcagtcctcaagggtgtatcccttgaagggtgaatagatttttgtgtttcgtttcattgcacactccttacagccccatcatctcacggataatgcggtcgctcatcttgactgcgcctacgaggacgagcatattaaagagcagctctcccacatagctccacacctgcgtgaccgccgctgcatcgggattgaccacgggcggcgaggatgcaaacagggagaagatgatgcaggacaacacaatgactgcgccctccaagcaaacagcacagtagcttttgatgaaggacttgcccacattctgcgaaggctcaccggcaaaggtagacagggggatgggcgcaagcgccgtatacatatacagcttaaagaagcgcccgtacacggtcataatgaggatgaaggacatcacggtgataaacagcccaccgatgagcgtcaccgcccatagtgggattgattcaaagaagccgcagtcctcgatggtggtgatcatttcagccggcagcgttgtctgttgcggcgaagaaaagcccgccgaactcataatggtagagatcgtcccctgcacgatgttgaacagggcgagcatcagttccataccgtaggtgatggctcctttggcaatggcaaagcgtataaagagcttcagggcgtgttccggcttcttgacctccgtaaacgatccgcaggtctttaccacacccacaacgaagaacagcacaagcagggcaagcccgattgcctgcaccgcaccattgatattgacgatcacgccccaaatcccgccgcccttgaagtcctgcggcgttgtcgtgatgagctgccagatctcggctaatttttcattccaggtttccaatgcgttttcaaggttctgtacgacccagttgtcgctcacgaaaagcacctcctttcaaagaatcggggcgtccccgaaagtccgggaacgccccacggtagggtttgctcagccgacgatcaggtcgaggatctccttggcaaaggtaatgatgacgccgcccgcaagggtcagaaagccgttggctcgctgggacgggtcgtgggacttgagggacaagccgacctgcaccacgccgaagcccagcaggataagaccgatggctcgaatcagcccgaagatgaagctggacaggttgttgacgacggtgatggggtcgccggcagcgaatgccgtgaccgaggtgccgagaatgagcgcagcgcccataatggcggtgcagtagatgcggaagccctttctgaccttgccggtcatagggagcttgttggtatgcttttcggtgtctttcttaaagatgttcatattcgtttcctccgttattttgaagattggttttcgtcaaagtcctcatcggacagtaacacataatcggtttccggcacttccgtgtcgggcagggttttgggatcgaggtatgtgacctcgatggtcgcaatgtcgctcctgacagcaccgtgctgataaacgccggctttcccgtctgcggtcaacgccacattcggatgcttcaggatgtcgtacttgaaatcaagcaccggacgctcgccacggataaaaaggatggcgtattggttgtccagcatacgcacctcgtcgggcgtgagaagctctctgccgctgatttggtagttggtgctgtaattgccgctgcgtcctgagcttttgccgtaggtgttggtgtcgatggtcgatttgcccagcagctccgacacatacttgtgggtactttgctcattgccgccgagatacagaaactcgtcgcagttgccgacgatggactcccattgcttttcaaacaaggcttttaactgcgccaagttctgcaagatgatactgaccgacacgccacgggagcgcataacggacagtatcttgtcaaagtcgtccggcaatgaaacgttcgcaaactcgtccatgagaaagtggacgggtacaggcaaggctccgccgtgtatgtggtcggcggaataaaacaactgctggaaaagctgggtgtataggatggacacaaggaagttgaagctggaatcgttgtccgggatgatggcaaacagcgccacctttttctcgcccattgtggcaaggtcaagctcgtcggtgcaggtcagggaggcaaggctttcaaggttgaatttttccagtcttgctgcaagggtgatctgaatggatttcagtgtcttagccgagcctgcgtgataggagcgataatacttcaaggcaatatggtcgggcctgtccatctccaagtcggcaaacaggtaatccagcggcgttggtctggaatcctcctcgttttcgattgcgccggcacggagcatctccataaccattgcaaagttctgctcgtcctccggcgcttcatagtgaaggtagtaaaccagtgccgacagcagcatggaagccgaggtgtcccaaaagggatcattggattgactgcccttcggcgtggtcgccttgaacagattggtgacaagccgttggatgtcgttgtcgctttgcagatagacgaagggattgtagcaatggctcttttccatagagatcaggtcaagcacccggacttcataacctttttgtgacagcagctcgcccacatctcgaacgatctcccctttggggtcaagcacgaaataggaattgcggcagcactgcatcagattcggcttgcagaaaaacctcgtcttgccggcacctgaaccgccgattaccagcgtgttgaggtttcggcggtgtttcttggcgttcagcccgattgccacattctgcgtcagcagcttgttttcgctcttgggctgctgtgcgtactttttgttcacggcactggcgctgccccattttgccgagccgtgttcctcccgcctgcggtagttcctgcgtgtggagaagtagatgccgacgcccattccgtagcagagaagcaaaacgaggacagcttttacactgtcctcgcaaagctcgatatggaacgggtcgttcatcgcgttcatcaggctcgtcaatatctccggcagcccgcccttgacggacggagcgatgagaagtccgagccataccacgggaatgataccgataagggagaggatgaccgccgcccgccggtcgttaccttgattcacggcaggagcagtcctttctctcaaccaccttgaactttttctttggggcatagccgaacttgatgatgaggtcgtccactgcgtcggtggtcttgcctctgtttttcagctcggtcttggtgtcgttcagggagcggatgataatcccgtgttcgtaatcgtccaaggcgacgtgatagcgttcctctttcatctgatgcacctcatctttcctgttccttgcttctctctgcacggcggcggtagatttcctccgacacacgggagccgatctcgttcattgccgaacgggtcttggacagctccgcacggatgcccttcggctccttgttcttcagtccgtcgggaatgtcctcgatggcaaagctcctcgtatccacgccgaatttgcggcagagcatatacccgacgcagacggcggagaagcccatctccctgcggctgtacgcttcgcagctcatggcaagctgggcgtgacccagctcctgcgccacgcactggcagagggcaacgctgtccccgatgtcgcgcttgacatagagcgtctgatcctcgtttctgtagaacgcacccatattgggggatggcagctcctccacggttgccacatcaatgggtgcggtgtccagcatcacggcgaccagcttgcggggatctcggtcaagggtcggcgcagccggtcttctgccattggtctgcgacacatcaaagacctttttgacattgtaggcaatgccggtgctgccgtccttcttggcgtactccacaggttcaaggatggacaggctctttgcgcccttgctgaccttcacgccgtcctcctgccagtcccgaaactccttgagctgggtcgcctgcggctgctgcttgtagatgagcagggcgttggcggcggaatagcgatccatacgcgcctgtgtgtccagatagccccggaacttttcaggggcattgacgatctcggtcgccgcatcgtcgatcatctgatacacggcgtccttctccgcctttttcttggcgacgtattcctccggagaaagctgcggtctttccgcagcgccggacttcttgggattgaaattgttggtcacagttgattacctctctttcggttttttggttcttttcggttgacggtgaaccgtctgtcgggacggttcgggtgctttcgctctttctttggcaatcgaaggctcggtgcggtctgcttccttatcagcctttacagcagccttgtagcgttccagcttttcccgcacggaaggctttttgtctgcctgctttgctgtaccccggtcagcatttgaacctccaatcgttgagcttcgctcggacggagggcttttttccgtctttgcgaccgtagggttttggtgggactgcccttctttctgcatgggatcacccattgcctgctccacgatgatctcgccccttgtcttggtagggacttcctttgccacggcgtcccgatctgccttgtccttttccgcttgggaaacgacccccgccttgtcgatcttgccgagttcaaagcggtcacagatccgctggattttggaagcgtcctcggcacgggcgataatatccaccggtgcatcgcccgcccttgtgtttttgtcccgcagcaggcaatacagtacgccgtagcgttttgcctgctcggtaaacttctgaatgtccttctgcggcagggaaaagaccttgagttcctttcccgaccggatcatattggtgagccgtgccttgcctttggtctgctgttcctgcttcagcacggataccagcagcagggcgacattctttgccgccgagcctgtgagttttgcggcgatctcaaagccttcaagcgaaagcctgacgatctgttccgccgcatcaccgccgttgttcatagttgcggttctcctttcgttttgatttttcttcctctgcacggactgcgccgaccttttcctcgatgaccttggagcggacggcaatgtcctcgcagagtttgacctccctgcggagttctttcagcttctcggagagagccgagatgctcgcccttgcctgtgacagctctgcatctgttctgttcacttttcgtatttcatttcggagatgcgttctgtcggcagtcagggtcttgatctgttcctccaccgagcgcttgtatgaaaaaagctgctcgtctgtaccgatgtggtgctttccgagcagcgtgacctgtttggtgagttcgtctatcttcatcaaatcctctttgaaaaggtagtgaactcttgcgtaattctgttgtcctgccttgtacttcggcagatagccgagccggtagcagtagtagaggtacagcccgtacagaccgcccgctttggcaattctgtcgctccgggttgtgagccggtattgcttcggtcggcaggtcttgggctggaacggctcgaagtcgatgctgtcccggttttcaatgagccgccgggtgattcgctccttggtgtactcgtcgccgagccggtagagccggatggggtgctcgtcgcccttacccttgatcgtccagtatttccgcttcgggttgcagccgaaggcatagcccatctcggacaggcggtactcaagctgcttgaggttgtggctcatggcgatggcttcgtcaagtgcggaacgggcgagattgtaccttgtaggcataccggccttgtccttcatcgtcaggtgctttgcgtcggggtaacgctccggctccttgatggtgctgatcccgtacttctcgcagatacggtcggcttccttgtagaacttgaaccacgaggtttcccggcagcgtttgccgtccacaaaggacacggagttgatgacgaagtggcagtgcagatgctcggtgttcaagtgggtcgtgacaagcacctgatgccgtttgccccaaacggaattagcaaactccatcccgatatgctgcgccagctccggcgtgatgtcggtttccttgaagctgaggtagccgtggtaggcttgaatgccatccggcttgtcgaactgctccttgacggtgacgaactgctcacgggcggttgacgggttacagttgatgccctgacagaacagctcctgctcggtttttttgccgtccttcacatagttgaccacatcccgcagtgcctgatagtcggcgttgctgtacttggattttgctttggtggttttctccgggttagcggcgtagtcgagaacggtcgcaaggcgaaccgtgaccggccagagcttgcttactgccatttgaggtcgctcttttcgggacggaggaactgccgctccacatccgcctgaaagctgtgccagcgctccgcttcggcgttcagcttctgcatatcgaggaagccgagggcgttcgccttgaccgtgagctggtgcaggttgttgccgatggcggagagctgccgcatcacatcgtagaaccggtcgtccggcttttccttcggctcaaagccgcgcaccaaaaggcggaacaacgccgcctcggacaggcaggtgcgcttggctttcttctgcaactcctgcgcttcgtcacgggagagccaaaactgctttttgaccgtccgcttcatttgtcatcaccgtcccttctgcttatttgtgtgtcgctgctgcggatcatccgcacaaggcacatcgcaaggagtgcgatgatgccgcccagcagcaagccgatcataaagaaaagtaattcgtgcataggttcatcctttcttgcagggggtattaggggttcccctaacgaggactttttgcggcgttttgaaaaaacggagtaaaaaggcactgctcgttaagataatgcaggtcgcttgggggaaccccgttctccccaaagttaccgttctctgtccgcttttgcgggcttaaacggtacagctacaatcttatcattgatccttgcaaagcgttcgggatactggaacttttcccggtatttctccgcaaggtcgggcggaaggctctgaaatctctccgcttcatacggtgcgtggcagataaaaaacttcccgcagatgatgtcaagcatctcacgggaagcctctttcagatagcacttttcaattttccaagcgttctcgccacgcatatagccgtccagccggacgcaggggtctgacccgtcaaggcaggagccgtagatggaatagccgcccagtccggctttgaatgccttgttgtcggaacttaccgcataggttctcgacttctcatcgtagggcttgttgaagctctcctgagagaaaacaatatagccggtcaggtgctttttgccctcgctctctgcgtttcggaagcggtcagccagctcggaataggtcagctccaccgtttccggctctgcataaatggcacggttgggcggcagcccgattagcttgccctcctcgtggcaaacgatggcgacctcatcctcaaagggcatatattcctcgatgttgccgccgaccaccgcctgcatcgcctccagcgtgtcgtcgatctcgatcattctcggatacctgtccggctccacgagcaggacagaaatcctgttttcgtgcgcttgcgtcggctccttgcagagcgatttgtcgaaagagatcttcttaaagccgatgctgtccacgaaataaaagccgggtttgagcgtatcgctctccctgatctcgaccacatccgatacggaaagagagcgtcccttgtagtcggcaggatggtcaacattgaacttctgatagatgttttcgagggagatgcagtccattttgccgtcataaactctgtcgtaagcggctgcgttgacttccttagtgcctttgattttttcgagggattccattccgatgaagcacacattggcggaatcccgatccatattgatctgataaatgctaaactcagtcatcgttcattcgtcctttctttggttttattgcggtggataccgagctggaaacaaagaaagtcattgtagtccttgccgcagggcggagggctgtcaatgacttcatacttgctcggcaatatggttttcagtgcaaggctggctttccttccggcattgtcgttgtcgaagtgcaggaagattttttgaatctgcggcttctcatcaaggagtttcacaagagccgcaggggtagtgctgtcctcgattctctccttgggcagatacacaccggcgagggaaacgaggttgtctttccaccaatctctgcccgccatcttttcaagcgtcgcataggaaagcaggtcaatggcacactcaaagagatgcaccgtgccgctgccgctgtctgcgatccgaaaagaatagtgcttgtcactgccggagcagtcacccaaaacacggcggtcattggtcgctcggtaggacgcatagcgagggatattcttctcatcaaagccaacgcacacaaggttgtggtatggcaggctctcgaagatcagccccttgtcaatgcagtattggatgatggcatagtcgatgcccctgccgaaaagatactctgtaattctttctgtggaagcacttttatccggcagaagtaagaccttcggttccgctttctgctttgacttgatcgccaccgacggcatcaccgccgcctttcccatcaatgtttcgaccgcttctacaaaagaacagcccttgactttcacaagatagtcaagggcattgtagccgccgatgcgctgtgaccaccacatccacttgccgttagaaatcttcaagctgtcgtgggtgcgggtggtataattgttaccggaaatgcggacaagctcctgcggctcacagctttgcagataggtcaacaggtcgatttgccgtgcctgttccaccacctccggtggaatatatggcataaaatcacctgctttcccgttgctgtttcttctcctgccgttgcaggctcttgtcagcttccgtttcgatggagtcccggatggtatccatatgctcggtttctctatcccggaactccttatacacatcactgagaggacaaggggaacgaagcaaagcccttgccttttccggctcaagctccagctcctccatacacattacgatgtcctcccgcatcgtgtattcgtaggtgtggttgaggatttcggacggctcctgatgcagtatccagtcccgatatttgtcctgctcggctttcattttctcataaaggcgagcgttgtaatctgtttcgctcatagcgaacacctccttcaaaatagaaatagccgcctgatttcttttgaaaaccaagcagctatgtacgccatattctgttcgacaaactggaagttagcgatttctttttccggtattctctgtccctcggatttcctcatgatagaaataatccacgattaccggatgtccctgcgggactctgccataaggcatttcattatccacaaagggacaatcatacttcttagccatttcctcagcttttacttcaagtgcttcaaaataactgcggttatgcttgttatagatctcatcgtaaagcggtacaagatcaagatattttccggcgatataatccatgatcgtctttttgaagccgcctcgaagattgaggttttcgagccagaacagatcacactgatcctttacccgctcaaagatggattcaaaatccgtgatgccggggaataccggagatacgaaacagactgtacggatacctgcatcatatacttgcttcatagcagcgatgcgccgctcaatgctcgaagcagagtccatatcgttcttgaaattttcatccagtgtgttgatcgaccatgaaacggtcactcgtccaaggttcttcagcagatcaatatcccgtaccacaagatcagactttgtgcagatcaaaatatctgcgtcactgccgattaactgctccagaagttttctggtattcccgaattgctcctcctgtggattgtagccatccgtcacagaaccgatgaccacacgctgtccggcatatttcttcggatttttaatttccggccaatgcttcacatcaaggaaagtgccccattcctccgtgtgtccggtaaagcgcttcataaaagaagcatagcaatacttgcaggcatgtgaacagcccacatagggattgaccgagtacccgcctaccggcagactggacttggtcatgatgttctttgtttccacctcacgaatgaggattccatcgattacttctgccatgatctctgtacctctaacactttattgaattcctccggcatttcctgaatcatattttcatcccctatgatagggacaaggtcttccttcataaacaccggaatgccgagtgcgtgtgcctgatccgtcagagaccatgcccattccggctccgtatgaatcttcctgctctgagccccggtcatagtgccgacaacgatccagttgattccggaaaggtcaactgtaccgggatcgtcgaataacggttcaaaggtaacatggtaatgctttgctctgatgtttttccgaagggcgtcgatacgccacagttcggctttcctcgtcaccgtaacgccaaaccatgcgttttccagatcggtatcaaaatccagcagatcggggcgcttggtaagaaacaagaactgatgctgtggattttcacggatctttgcaaatacctcgtctctccattccggcttccatccggagagatcgctcatgccggtaagaagaaagttttgcggacgtttcttttccatcatcttgagcttacccggaaagaactcaggatcagcgaagtcatcgatcatatgccagcgtttcacattgttgcgggcatagcaatatgcacaccccactgtgcagccgatgacgaggttcatgttctgaatctgatctttgatacaaatactcatgacttctgccactcctcaagattctttctgatgcggtcgaggcattcctcaaaccgggtaatttcttcctctgaaaaacccttgtagtaaatgctgcccatctcatcagatacagaatcgtactcgccctttaaggcatgtgctttctcggtcagaaacaggagggttttccttttgtcagtttcagactgaacacggcttatcagcccttgattttccattctttccagcatcgtcgtaagagatgttatcgctaatccgcatttagtcgagagtgatctgattgagataccatcctcctgccacagcacataaagaatgcgcccctgggctccattgaacgcatcaatattcttttcgctgagaatcttctcaaaaatccggtctccaagttgttttattttggtgacaagaaatccgccatttgttttcatgcaaatactcctatatagtagtttataaaatcatactatataggagctttattgtcaagagcttgtatgtttgaatagaggtaaattccgatttgtcattctgatttaagaatattatattacgatattgtgactttttctaccgtcaagttcgcagtatgtgtctgcggtatggggttgctcccataccgcagacggatcatctttccggctcgtttttgcgctttgtacttctctgaaccggaatggagagcagctctcttgtacgctctccaagttgtttttcaatggctgtcagccgctgctccggcaaattgagggacggatgacgggtgaacttgaagtccaccattcgccgcagctgtgctttctgctttgcccccattacctctttacacacatcctcataggaaatgcggtagggattggaacgggtctttgcgtacgcacgcaggttcttgaaatcatccggcattgcatagttgaacagcgacaagccgttatcgaagatgggtgcaggggcgataatttcgcccgtgtgattgttccgcagtaaaccgaagttgccgaagtgtctgtcctcgttgtaaatcagggcatcgaaaaccagcatactgcaaagctgctcgtagaactcgtcgcctaaggtcttgtaataatcaaggcaggctttcagtgttgtcttgcggagaatacgcccgatagggacgaaagaggtatcaatatccgtgaacagccggcacttggaggcaaggatacctttccagttttccaagtcatactgtacgcagccgatgcccattttgtctgcgatctggcaggcataatattcgctgtacggctcgtttccggtgttcgcagccccctccgtgccgcccttatacagatagataccgtcaccctccacgaaccgccaagccttccgcagcataccgttggtcgtcagctccggcgaggtggagaatgcctcccgactgccgccaacgccggtataagccaccagcgacagtgcttcggagaagcggttttcatagaggttataatcggcatatttgccgtcaaagtcagcgggtacgacccaatagctgtcgttgagggacagtcccatacagacatcaatgatgcccttcgtgttgtttacgctcagccccagcgtctttaagatttcatctacaaactgccggttcttcgggatcacccgtcgttccagccacttcacaacgccctcgtttgtcagctccaagtcgaggggaaacagcttttgctttgccgtttcgatgtgaaggatcgtcgcctgcaagccctccaagcctctttcctccagcgtgaaggtcagcagtgtttcatcataaaggcgcaggctatattctttttccattgtgctgctcctttcctcaagcattacggacacatccttgtcaagtgcttctgcgatcttgagcatcaggtcaagggagaggttttgcgttcctttctcgatgcggcagatgttggaacgctgggttccgatgcgctttgcaagctgctcctgcgacaatcctttttccagtcttgcctgcgtcagcttctgcacgatgctctgccttgccgccaacagttccttttcggtcatacaaaaccctcccttccgatccattatgatgttatcatatatgataacgattgtcaagaggttcggctatctttccaagtccctcggtttcttttcgggcggttcttcaccctcatcgggttcaccgccgacgatttcgttctcacgcttatccacattgagcagggcgttgagttcgttcagccggtcggtcttggctttcaattcttcctcctgcgggaacggtcttttcacatcgacctttgcagtttcaaactgctttttgaggttgtcaagctccatttcgttcatctccaaacgctttggaagcccctccagcgcattatccaagcgggtgatattaccgaaggtgtccgtgccgagggttacgggatagccaagttcgcccttgagccgcactttgtattctcttgcttcaaagtacagatccatcgtaaagccacggtattcaccgaggggaatgggttcgggattcgtcattgccttacacgcctccaagatggcgttgccggcatccgctttctctgaatagaaagcacccttgaccgtcataccaacaaaggtttcatcagacggcttcgggtgctctgcaactctttccatatcggattttaatcccgcaatcacatcagcccgccgtgcgatctcctgcggatagaacttgatgatcttatcctccaaagcatatttttcggagaggaagctggactttaagagccgcaatttctgaacctgaatgtccaagtccatcttctctttgatgtggggattgccggtcgccagcattttgatttcagcataggacagtgcggtttcgtcaatatcttcgcaggagcgtaccggcgatttgctggtcattatctgcgaagcgaacttctgcttgccttccacgagctgatataagtaggcatcaaaggtttcttccgttacaaaacggtagatgtgaacctctgcattttcgttgccttgccggatgcttctgccgagccgctgttccaagtcagacggtcgccacgggcaatcgagatcggaggatgcggcaagtttgttctgcacattcgtaccggctcccatcttctgcgtactgcccatcaggatgcggacatcccctcggcgtaccttcttgaacagctccagcttctttgcttcggtatctgcttcgtggatgaactttatctcatcggcgggtacgccacgggcaatcagcttctgtcgaatgtcgtcatagacattgaaggagccatcgtttttcggcgtagacaggtcgcagaagaatagctgggtcaaccgtttctcactgccacgctcccaagtttcaaacatagcgtccacgcaggcgttgagcttgctgtcctcaaaatcagggagcaatggattgataagccgctgatcaagagccagctttctgccgtcgttggtgatcttgagcatattatctaccttggcatcaaccataccgtttcgtaccctttcggctctctccgcaagctcggctaccatctgcttttggatttcagaaggcttcaccgagatattgtgaaagaccgctttcggcactggcaggtcaagcatatccgctgttttgatgtctgcgatttccttaaacatcgccatcagctccggtaaattgtagaagcgggcaaagcgtgttttagctcggtatcccgtcccttcgggtgtaagttctactgccgtaatggtttctccgaaagtggaagcccaggcatcgaagtgctgcaagttgttctgaacaagagtgttgtactgcaagtaccgctgaatggtgtaaagctcgaccatcgaattggagatcggtgttcctgtcgcaaacactgtcccacgccctccggtcagttcgtccaaataccgacacttcataaaaaggtcgctggacttcattgcttcggtttgagcaatgccgcctacattccgcatttttgtaaagaggaacaggttcttgtagtagtgactctcatcgataaagagtctatcaacacccaactcctcaaaggtcactgtatcatcctttttggattggtcgttgagcttattgagcttctgcttgacagatttctttgtgcgttccagttgttttacggagaagttatctccacggttctttttcagttccgtaatgccctccgtaacttcatcaagctgctgttcgaggatcgcccgctgccgttcaatggacattggtattttctcgaactgcgaatgcccgataatgatggcatcgtaatcaccggtggcaattctgccgcagaactttttgcggttcttggtttcaaagtctttcttcgttgccaccaaaatgttggcagagggatagagctgcaagaactccgatgcccactgctcggtgaggtgattgggtacgacaaacagggatttactgcacaatccgagccgtttggactccatcgccgccgaaaccatctcgaaggttttacctgcgcccacggcgtgtgcgagcagcgtgttcccgccgtaaaggatgtgtgccaccgcatttctttggtgttcccgaagctcgatttccgggttcataccgctgaaaacgatgtggcttccatcgtactcacgaggacgcaggctgttgaatttctcgttgtaaaggatgcaaagctgttctctgcgttcggggtcagaccatacccaatcctgaaagccctgcttgataagctcctgctttgcctgtgcgattgccgtttccttcttgttcagaatggctttctttttgccgtctgcgtcctctacatagtcgaagatgcggacatccttcagattcagggtttcctcgatgatcttgtaggcgttgatgcgccccgtaccgtaggtgctgtatgccttcacattgctgcggtcataggacttgccctcaatattccactcaccggtataggcagagaaatgaaccttgatgttccactgtgcgtacctcggtgtacccaagaactcaaacataaactgttcgacaatttcggtcggcagccaagtagcaccgagccgaacggcgatctcgctggcggtcaggtctttgggctgcacccgttccagtgcttccacattgacggtgtaatcttcggggtaaagctccgccgactttcgggcgagtgccaacttttcacgcacattgccggagaggtattcatctgccatcaggtactttgcctgtgcggaattgccgtacccgtgcatcggattcagaaagataacacccttcaggtctgcaaagatttcttcctcggtcttaccggtcagttcgcacatataatccatatccacacgggctttttcgcccacagaaacggcaagtgcttcgctggaggtatctacggaagtgaccggtgtgtgtggcttgatggttcgcttgtagaatatatccgccttgcgttcaagttgcccttcatcgcccaagacctcaagagccgagagcagagaaaaggagctgtcctgtgaaaaggcggagatgttggcacggctgttgatgagtccgtactgcttggaaaaggcatcataaagagcgtttaatcgctcctgctccgctttaatttccaagtcggggtaatcttccgtctgcaattcaatcagctttctgaccgaatcacggatgcggatcataccctttatgcggttctctgcggtagcggatacctccaccggagccatacggctgttttctcggaagtagattttatcgtccagcaccgtataggagaagttacggacggtgggatctgcgggaatggaattatcctcctctgcaagctcatcctccacctcatatgcagtcagctcaccgtgaatattggaaacggcttcgctgagttgctcggcaaggtctgctccctcgtaagggacgcaggtggcttcgataccgaaacgccccgacaccattctcatctctccgagtatcatttcgggatgctcaacaaagtagctgttcatcaggataccgttttcatccgtgccaagctgtacccaatccggctctatatccacaatgcggtcacgcttttgcagaattagaatgtccgaaacgacctccgttccggcattgcccttaaaggtgttgttcggcaaacggatagcaccaagcaggtcggctcgctgagcaatatacttgcggacagcggagttttccttgtccattgtgcctttgctcgtaatgagcgccattacgccgcccggacggagcttgtccaaggatttggcgaagaagtagtcgtgaatgaggaacttgtgcttgtcgtaacgcttgtcaggaactttgaaatccccgaagggtacattccccacaacggcatcaaagaagctgtcggggaggttggtttcctcaaagccctgtgcggcgatagaggacttttgatataactgctgtgcgatgccggcagaaattgtgtccagttctacaccgtagatcttgctttccttcatttcttcgggaagcataccgataaaatgcccgatgccgcaggacggttccaagatgttgccctcacggaatccaagctgtttcatcaccttatacacggcattgataaccgttggcggcgtgtagaaagcggtcagggtgctttctcttgcggaagcgtattcctccggcgtcaggatgtttttcagcatcccaaactctgtctgccaagaaccggctctctcatcaaaggcttcgggaataccgccccagcccacatatttagagaggatgatctgctcgtctggtgtggcgaagcggttttcttcctgacaccttttcagaacggtgatcgccgcatagttgcggtgaaagcgttctttcttgttgacctcctcgacctcgtgagaagcaaggtcaaaggtatgacggtctgccattgggatttcgggatgaatatcaaaggtctgcacccggcttttcttcggatgctcccaaacaggggtaagaggtgcttccacctgtgcaagttcttcctcggagagatatacaaggtcgtcaaaggacagtgcttgcagtcctttttcggtcagttcttcaagagacgcatactgcacactgcggacgaccttgccatctgcaagagtttcgatgcggaaatccacaaggttgacccttgcctgtattttgtgcttgtcatcctctgtggtggtgtaggtaatacctacattggtaagatcggtgtagtccgcaccatcctcacgctgatactcctcacggcaaaaatcatcaatgagatgcttcgccgtatcaagggaggcttcggtacgctcaatgggaggaatcccttgaagctgtttcagatagtcgtttgcctgccattcgctggcaaactcctcactgacgccctcttcgtctacatagattgcgctgcgggtttcatcccagaccgcatagccgttttctgtttcaatgacggcaaatcgttccgtaagatacgggctgtcgatgatctcaaagcccttgggcggtgggtcaagctgtgcgataaacccgtgcggaatggtactgccgtccttgtccttatacagaacaatactcatcggcacaccgtagtagttttcctccttgatgtctttctcaaactgataaggactggtgtactcgatgctttcaccgaccttgccgtccgtgccgagatagtcgatcctgccgataggtttggactcgatgggcgcttccttcgtggtggaaaccacggtgcgggtaatgcgttcgccatcctccaaagcgttgacctctacatcgtaccctctgtcggtcagcattgtaaggtaggtttccaagcggtgctgcggaaatcccaccatagggacacgggtgttatgaccattggcacgagtagtctgtgtcagctcaagagcagtcccgacgacctctgcgtcatcagcataggcttcaaagaagtcgcccacctgatagagcaaaaggctactcggattgtctgctttggttttaagatacgcctgatagaactccggcaaagcagcatcttttggcttttctctttctgccacctgtctgatacgctccacaacactttgcggcaagtcctgcacatagaaggtgatctcaccttcgggggagatatgggcaatgttctgatagtccccattgacctccacagcacggttccaaacggtcagtccgttgccgagatagcccatcccgatgtcatactcgaccgccttttcttcgggctgtttaatagcgaccttcaaatggtcattcagcgggttctcctgcaccttgctgtcgaactcagttctcgtcatttccttgttgaaaagcggaaactgcgtatcatagagcatcacacgctcatcatcaaaggacaggatttcatactcgtttgcgccgagatagacggtgctgccgaggtggtactcatatcgctcatttttcggctctgccttttcggaaggtgcggtagacaagatttctctgttcctgcgttcctcggcaagctctgctcggcgttcttcctgcctttgcaaccattcaggatactgtgccttttccttggggttcaggtaacggtcgagttttatcagctcgccaatacgcttctccacctgactccatttcaggtcgatatgaggtttatcgcttccgatgcctttagaaatacggatacccttaccgtcgtgctgttcatcaataccggctccgacgattacgggataagcaccgccccagccgtattcgtttttcagaaagtcggcattttcctttgcagacaggctcttttggaactgctcatagattcgcatttttccctcagagatgccgcttccacgggtgagaacagcgtcgatgatctcctgagagaaagtaaaagcagagggctttcgttcctctgctcctgctgtcatcaagctcaactgcccgtcaatggacggcagcggtttcatcgtgtcctgcaactccccaagtaaccgcatcgcttcaaaatgctgggcaattacgccccaatcatagaagctctgcgctgtacgggagagatagctgccctcccaaagctgcaacacattctgataggtcttgtagcccacacgccgtccatcgctcagaatgacctcggtatagtcgttgttgaaaatgcgcttgatataagaaatacgggcgttctcgtcagcggtagcttcaaagaatgcccgtatctcgcctttgcttgctttcaggtgcggcgtggtgctgaggatctcacgaacggtgtcatcgccgccgaagaacggcaggctcttatcctcgtgacttcggtcgtaatagtctaagcgaagattacctccgccatcacgatttcccgcactcggctccggatgctgttcatcttccgaacccagctcatcatatccatcgctttcaggctctccgtcacgccctccgacgctaccatctgctccgtcagcatctgttccagctcgttcgctctgcgctccgtgtcgttcagatgctcgttcagggtgcagctcgtcagcaggttgtagtagcgtaccttgtgatgctccttcaggaacttcttccgcatccgggcgtacctgcccatcgacagctccggctgctccggcattgtcagatcggggagcagataatccccctgcatcgtgtaagtgatctcgttcatcgtcaggactcctttcggttttttctttgcctacattgtaatcggctttggttttctctgcaattatgcgattttgacggtcgagggcaagaatggtacgggaaatctccgcaagtcccatctccgcaatatcgctggtggcatagccgagggcgttcagcgtggcaggcgtcgtaaaattcaccacatcccgaagatcatcgggttcaaagtattctccggcttcaatgcccaggcgggtcatcgtcatataggcgacgctatttcgcaccgccgttttgaaaatgtgggtgatttcttcttcggatacgccgtccaggaagctgtctttcacgctgtagatcagatcggagagatagtcggggatgttgtcctctacggcgtttcttgccgccgactcgatggcaacggcaagggtttccttatcgtccagttcaccaaaggtgctttccagcgtgtcgatcacttctgccgtgtattcgtcccgcatttgccaaatgggaactctgcgggaaaagcggctgggatgcgtgtcggaaatatcgaagtagtggacaagccgctggcggcgttggtcggcatcctcaaaaacggcaatgccgtgtgctccacggttgacccatcgcccgaacttttggttccagtcgtcgatctgaagaacggcggtggcgtccggtcgctgtgcgtgaaccaaaagctgctcatcaaaacgcagacggtagttgtagcaggcagagcgcagaaacgcttcccagctttcggggtttgcaacgaccattttgcaggttcggttatacagctccgaaatgaagtcgtattttcgtgccatcggcggacacctccttatcgttcatagtctttgggcttgatgggttttccgttctcatcatagctcttgggtttggctgcaatggagtcccaccggatcatagaaccggcgagcattgcctgctcctgcgccttgctgacacccagcttttcattgaacttatctttaattgcttcgttctctgcacggttcccgtcgttaaaccttgtggcggtatggcccttttgccagcggtcgatttgaatgacttcgccggtagacgggagtatggaatagcacatcggaggcaagggcggctccattggagcgtaggtacagccgccttgctccatacgctcggcaaactcgcaaatatgaaagagattgcgtccgacctctgtgtgatagttgttaatatagcggcagggatagctttccgtcttaccgtcacggtcggtcacaatgatgcgctcgccgtcggggatgcggaacagctctttatagtggctgtcaataaagcgaatatcccggttggcttcttcgatgtgcttgtccagccattcctttacatagcagaggcagtagaagttatagtcgcccctcgttggattacagcgaagcacgaacgcatatttctcggtatctgctcggaagccgaactcagtggtataagcaccctgcatttcgctttccttgttctcacgcccataacgcaccatctgagaacggctttgaagcagtccgtactcctcggagcgcagggcgttgattacatcgtccaagtcccgcttgaactcatcgcttttccattgcggtcgggtatcaaaccaagtggtataaaactgatcgccgcttgagccgaagtccccacgcagataaccgatgttgcctgtctgcccttgaagctgcgagctttgagcgtaggtgtatttgcgttcgggaacggtcagcggtcgcagtgtgaaatctgccattatcgctcactcctctcttgagatactctttgtttcgggatgtcaaagccgtaaacggcggcgatctcatccccaagtcgccgggtcagccgggtaatatcggctcgtgtggctttgccgtgatagattttatctttcaggttctccatctgcgtttcggaaacgccgtctttgaacacacggtaaagatagtgattcgtgccgtcgtgatgagtcgcatcggcacgaagatcgccgtacttatctacataccattcggtatagtcggtgtcggcatacaggcaatctcggatgttgccggaggggatgtccttgtagcccatcactctgccgttccatctgccgatgtcgccaatgacaatgatcggctgggaaagctgaacattcaggttgactcgctcatcggagaggtagtcgtaattggtttcctccatccactcatagagtgcctgctcatcattcgggtcgtcgtccagttcattcgcttcaaggaactccttgtagtcctctcgccagtcgtccacatcaaggttttggttgctccaaatgatgtggcggtcattcggtcgtgtcgcttggctcatctgttccacctcccaagtaagagaaaaggcggttctttgcaacctgctcctgaagctcggtgatgaccgtcatatccggcacggtcacatcggggattttcaggatcgtcggcaaggtcagcgccttcaaatccttttcggttttacagcctgcgtcaaagagctttaccagcaccttcattttctgctgtaagccctgctcggctgcggttttctttactgttgccattgcggtatcctccttatcgttcatagtctttgttgcggcttggtttcgcctttgtttttccatcaaagtctgctttcccgacttcgccgcaccattcaaacagctctttttcgcccggacagtagagtttcccgttgtccacgcaaatgaaaaggtcgcagttttttatgctcgacctttcatagaacgctgaatggtcatagtggcttttgtccccggcatgggggttgtccgttagtccgagatcgttatctcttgccgtgtgccttgaaatgaagtccagagtgtcctccgcttttgtaagcaggcgataggggcagaaatgcttgccgccgtattcgaagatcagcttattgccctgaatgtgtttgagtacggtctccttattgaccgcccagtgcggcatacattccggctttacttcacccatcacatccacacgctcataccgggtcggtttcccgtcatagagattcgtgcaaaaaacagcgctgccacggctgtttgccgaagcgccgaagcctcccgttacgagataaagctgccggtcggctcgccggtattccggcttgagaacagcggggttgatggcgatgattttgccgttgatgtcgttcttatagtggtcgggaatgcagtccgcttcggcaataaccgtcacaggaatatccagcttttcaacctcttcccgaaacctctcggcatcttgcttgatgcgctctgcaaagaacagcgctgcatcaatgtagtcgtcaccaacagcacactcggtaaacttttcaaatatgtcgttgcgctctccgtagcagcagaggaagcgttctccgttggtactctgctcattctcggcaaggatgatttcacgggcgccgatattcacggcgcagaggacggtgtaatcaccgacctttctcttttcattttccatagccgttacctcagagaatgccgatgatgataaccatactgtcatcgtcagggttggcgttgcgggagtattccggaaaaagcgactgcacacgctgccttgccctgcggatggtttcaaagcatggcagtccgtaggatttgtagttgtatgccaagtcctccagcggcagctcgccggcacggagatcatcggcatagcggttgtagtagcggtaatacaacttcatatcctcataacgggtttccggcgaattccgcaggatctgaagcactctgctttcaacggtattgattcggttcattttctccctccttcgggtagtagaaaaggggcggagtttatcgctccgccccataggtgattggctcactacctgtttttctttcttacctgcaagaagataaagccgccgatgataaaggctaccagtacgatagccacgatggttttcggttccattagttacgatcctccttcttctttttcttgaatccaataacgctgcacacagcgatgcccgctgcggacagacctgcaagggcatagagcagcggcagattggttgtgtcgccggtcttaggcgtatcacgcagaacattgtgcatctccacaatggtagtggagccgagtttaaccgttgccttcttatcagcagggatgacatacatcgaagaagccgagttgcttacctcagaaatggtgtagtccccgatgcgaagcccgtcaatgaagatctcacccttgtcgttggtttcaaggataatgtcatagccatttgcaccggtaatgcggaaagcgaagcccttgacattgccgtcagaggaggtcttgacgattttcaggttgccacgcatcgcatcattgacgaagccgacgcctgccttgttctccacctcgtaggtcttgccgttggtgtcgatcatcacttcatacactccggtatcgaggacaaaaccctccggggctttggtttccttcacgaagtaacgaccgtagaacaggtctttcatctcataggacccgatttccttttcggtcagtgtgccgagcagctcgtcaccgtcgtccagcttgccgtttgcgttactgtccttgtagacctcaaaggttgctccggtcagcttattgtcaggatattcggcatccaccttggtcagatggatgtttccacggacatacttgttgacgatttcaatctccacgacctgaccgtctgcgccgatggtcacggaatagatggtatcatccagcacgaagccggcgggctgttcgatctcacggacataccaagtgccgtaagggatgctctcaaaagaaaaactaccatcttcagcagaagtggtagtcatcagagcgttttcctttgtaaactcgccgtcatccgtgcggaacagtccaatcagcgcaccgccgagagcactgccgttttcatcgaccttcttgccggaaaccgaaccgtagatcagatcattttcgattgccttgccgtcgttagcggcaatctttacaactgccgtatcctgaccggcatacgcaaaggtaacgggatacttggtatcggacagcatatagtggctgtcggtagcaagctcctgcacatagtagcttccaaaaggaaggtcggtcttaacctttgccgttccgtcctcattcagagagatgatctcgatcagaccgtctgcgggaattgaagtgccgctggcagatacgatctcctcggcagcgaacagtccaaaggagatattcttcatttcaccgttattgccaatgccgaagcgctcattctgctcgatggactttacaaggctgatctccaccttctgacgctcgttctcgaacgaagtcgccgtttctgttacggcaacattctgaccggcgtagaccagttcaacagaatgaggctcgctgttcagcaccataccatgaggtgcggtaatctcccgtacctcatatttgccgagatagagttcacggctcttggcaacgccgttttcatcggtggtaaccgtgtccacgacctcgcccttctgatttcggacagtgctgtcctgcgtgataatatcctctgcggcgatgatctcatagaccgcaccgggaagtccacgcttttcatactgcggcttatagatggtgggcagttccttgccgccctcgtccttgccgccggtcacggaaacgccgaagaacacctcgccggtcttttccaccgtgatggtgcccttctgcgccatattgggcttatccacttttaccactgtaaccccgctttcctcggtagcgttttcctccgtgacatcaaagtacacgggcgtagagtcaaggacatagccgtagggagcctgcacctccaccagcgcatagcccgaaccgaagtccagcttctccggcgtaaccagtgcgccgtttgcgtcggtatagaatgtgtcgatgctcgtcggcgtgggataggtgtaggtcatcgtcacaaggttgccggcagggtcatagatttggaagcccgccccggcataggggatgctcttgccggtttctgcgtcctgcttcacgattttgatgaagctgttaaagggtgcgttgttgataaggtagcgataagtcgccccattctgagaaatgaacacatcaaagtcgggcatctgctcgctgccctcccagccggatacctgatggacggtgtagatgccgtaaggcatatccttggtctgtgcaaagccgttttcgtcacaggtgagataatcacgctcggaagcctttgcgctatcataggagcctgcggctttcagatacacggcaaactcagcaccattttcgggtgtttcgatctgcgtatcaccgttatcggtgtgcttgatgatggcgatattgccctttacgacctgctcagttacatcatttgccgtctgattatgctccacggtatagagctgcggctctgcaccgaccttgtgaacggtgttgtccagcagatagccctcggacggggtgatctcacgcaccgtccagtcgctgtcgcagatatattccttgctggtaaactgaccgtttttatcggtggcgtagctgtccacaagggtttcgcccttgtaaatgccatagaccgcaccggcaagggatgcgtcgccctgtgccgttcccgtttcggcgtcgctcttggtgacggtcacggtaaactttttgaggatgttggtgaagctgcggcttgtgacctcgttccacttcacgggtgcgatctgcgcttcgggaacgacatagcggacggcggtgtccacctcctccacggtatagggggaagaaccggaaatgaggacatccttaaaggccgccacgccgttcttatccgtaacggcgtactcatccaccgccatgccggagagcgaagtgccgtagagatggaaggttacgccctccacaagactgtcctccgaggacttgatgatctgcaaatctccacgcttgagcttgttattgaaattcacggtggaaacctgaccggaaaccaccgtaacacggcgggattcctgcggctcatacttgtcgtagtcctgctccgtcacggtatagacaccgggcatcaggttgtcgatctgaatttcacctcttgcattggtcttgaccgtctgattgaccccgttgccggtgacggtaaaggtgaggttgtccaccttgccgtcctcgctcgttttgacgatcttggcagagccgcagctgaccttcaaattgaggaacgcctgcaccgggtcgcttacctcctgtgcgtagctgatgacatcctgaatgcctgcgccgggtgcgtatctgccgtccgtccaggtgatgatgccacggcgggtggagccggttttgctggcagtgatccttacgctgtcggagggcgcattagccgccgtaatggtgagtttatttccgctgacgctgaaggaaatgccgtcctcgtttgcggaaaagctgtaatccgagaggacacggttgctgtcagtcagcgtggcggtgtaatttgtgccgtcccaagcaagctctacgctctgcgcacggtatgcgttcttggacataaagctgggaacggttgaatgacgctgcacactggcgacaatgctgtcgtaatagctgcaaaaccggctgtaaagcgggtgttcggcgctgacggactcctttacggcgtcgtagctgccggggctgacgtgatcaaagtctgcgtcacgctctcccacgatggtttcccagatcagcacctgcgttgccatcgcctctgccagtgctgcggcgtcagcggagttttgggaacgccacgaggtgctgatgggacccgtgtagccgtactgcatgatgcgcccgataaacagcttcatttcgtagggcgagatggtgctgttgaaatctgcgggcaggttgtcccaaaaggtttcgtccttgctggtgtagcggtcgccggtttcctgcgccgttcccggctcgatgcagtagcagatgttgccctcatacgagtgcatcgctcggatggtggtatacttggagttcccggagtaccagccgttcatatactggagattcgggtgtccccaagagccgccgtaatcgagattggcgtctccgcttctcggaaaggaaatgaggtagacctccgcctgctctcctgcggcaaaggcggtggtcgtgccaagccccacaagggcggtcaggcacatcacgagggaaagcagtcctgccatccctcgcttgaaaaggtttcgtttcattggtgtttttcctccttgtaaaaagtaaacgcaccgttttcacgatgcgtttcagagtgatgtttggttttgtttttatgcgtagccgatatacacctcgtaggaattgccgcttgtctgctcataccaaacccagacctcggtgatgtcgctgtccttagcatagcggtcaaggtagcccttgatgtcccgttcggtgtacctgcacttggagcctgcggcaatggggttgtcccagcagtaggcggctccgctgtccagcgtcagccccacgctttcggcatagctcttggcaaagttgacccagtagccgatgtcaaaggacggctcggtgggcggctccgtggatggttgtgtcggctggggaggttctgacggcttcggttcctcggttgccggagggatgggctgttctgtttcggatggagccggtgaagctgtggtttccgaccgacgctcggactcgtccttcttttgctgcggatcgcttgtctgcggcggcgttgtgccgcttactggatgttcgggaaccggtcggcgttcgctttccgtgcttccttccgtttcctcatctgctgtctgtgcgctttgtgcttcgggtggctgagccggggctgtctgttctgcctgagaggtatcttttccggcagcttcttctgtctggctctccgaaaaagaaaacccgtcgggcttttcggtgttctgtgaagccttgccgcacccggcagtcaggcacaaaagcagaataaggaatatgctcaaaaccctcgttttcatcgtgcgacctccttttcgcactcattttagccgaaaaaagagggggaaatcaagcctgcgatgacggcagaacccttaatgataccgcaaaccggctttttcgggaactttgcgctgtttccctcggctctcttagatagctatactcaagggagatagagtttatttaagagagatagatattctcttttcggttagtctgttagtattcaaggggttggagtgtgaggaaggggaagcggaaaaacgtactccgcctgccgttaccggctgtcacgatccgcccgctgacggagaaagcggctgtaatgctccaaggccttcagcacatagtcctccgtttggctgatgggaatattcttggggatcaggcttcgcaccttgtcccctcgcaggatgatcttttcccgctggttgggcttttcttcacacataatggcggacaccacctctggcgtgagcttgccctccgaaaagaacttccgcatacggatggtctggtcatgggagggcgtacactggttcaggtcgatttcctctaccacatcccgctggcagccctcgtccagataggacagctccaccgcagggcgcatcttgattctgccatcgtccacaaggtcaagcagttcggggacaagattggtaaggcggacatatcgctgaatttgtgtgttgctatctgtgccttcggcagctaaaagctctcttgacttcccgaaaagattatcgtgtcccagtgggacaccattttctttgctcggtctgcctgcctgacgcttcatcgcttccaagcgcatcttgtaggcaaatgccttttccgagggaagtatctgcgaccgctggtagttgctctccaccatcaaaatggtggcggcgtcacggtcaaggtctaccacctcgcagcggagcgtttcaaatccggcaagctcacaggctcgttttctgcggtgtcccgaaacaagctcgtatctgccgtcctccttctgccggacggtcgccggggtgatgactccgcgctccttgacgctctccacaagctgtaacatatcctcatcgtcccgcaccttaaagggatggtcggggaaattgtcgatctccgtcaggggaatgtcccggatttttgccagctttgcgtcgtcccgttcctcctgcgtggagaacaggtcatcgagcgtgttcgtgggaagcgtgaagtcgctctttctgcctgccatcggctaacacctccttcgtgaaatctgcgtaggccttggacacggtgctgttcggctcataggcgtatatgctttttcccttggacgaaacctctgcggctttcacggcaacgggaatggtcgtccggtaaatcctgatccggcagccgaagttctcccgcagcgcctccacggtgcttttggcgagattcgttctgccgtccacaagggtcagcaggattccgtcgatggcaaggttcgggttggtgtgcttttttaccttggcaatcgtggacaggagctgcgtcattccctttgccggcagatattgcgcctgcacgggaatgataacgctgtccgcagccgtcagtgcgttaagggtaatcataccgagggacggcatacaatctatgaggacataatcgtagttgtcctttacttggctgagatagttcttcatcacgctttcccggctcattgcggtcacaaggctcatctccagcgccgacagctcaagattcgacggcacaaggtcaaccttttcctcgtggctgagaatcccggcaaatgggtcttggctttcctcgcgcattaccgccgccagcttgttggtcagcgtctgcggcagactgtctgaatcccgccagccgaggcaggccgtaaggtcgctctgcgggtctgcgtctatgaggagtacctttttgccctgcatggcaagcccgattccgaggttgaccgccgtggtggttttcccgacgccgcccttttggttgcatatcgctatggttttacagtttgacatctttcgttttcctccttctttgtagatttcatagccgcctgtaatgaacggctatgtatatgtccgcagtatttgtcctcaacgccccctgcggcggctttcgccttccgggaaacacttgggtcacggtgtgctgcaccgtgtcatagggctttcacctctgccgggttctccgccagctccgtagagaagtatcataatccttctgactgtcatcgccgtcccggtggcaatccgggtttcagatcgggggttctcgctcgtcctccggttaggagaagtcacggcgtacccatcttcgggctaatcatcagaagtaatgtcccaagtgcctgtatattcaattttcaaggttcacgaagcggctcccgattgtggttgggaaagaaccccttcacttactctgaataaggaagcgatttttgagggtgtttttcaaaaaaagttgaaaaaatttttcgtgccccttggaaagcaaaaaagccgcccttccgagaacggaaaagcggctttgcgtttgaatgatttacttgttcatatttatatagtatactgtggtcaggcttatggaaggagggcaagagctatgacgaacggcagcaacagaagcaaagagataataagcaggctcggtttgtcctcccggactttttgcttcataacgaattacggtcagttcagacgaaaacggggatagtacaggactatcctgatttcgcgcagggctgttcggtgagcagttctgcttttactttatatatgggagatgatacacgatgatttattttacggcagacacgcatttcggtcactacaatgtcatccggttctgcgaccgtccctttgcctccgccgaggaaatggacgaggcgatgattcaaaactggaacgatagagtgaccggaaacgatacggtatatattcttggggatatgtttttccgcagcaccaatgcggagggaatcctgaagcggttgaagggcaagaagcggctgatcgtcggcaaccacgacggctcgtggatgacgaagtttgactacgcaaggtattttttcagcgtggacaagtttttggaaacctcggacggaaagcgctctttaacgctatgccattacccgatgctttcgtggaagcacgcgaagcggtcatatatgatccacgggcatattcataatgatacgagggcagacttctggccgctgattgccgcacgggagaatgttttgaatgccggtgtggatataaacagctttatgcctgtaacttttgatgagctgctggaaaacaaccgccatttcaaggaaaactctttggcggaaagctatacctgaaatgaaaagagccgcttactccgattgggaataagcggctcgaactctattcagatgtatacgaccttcagcttttttcgctttgcgccggtcagcttcaccagcacatcgtcaacggcgtccgtgtatttgccctgccggataagcgtgtttttcaggtctatgagggatttgataacctccgaccgttcctgctcggtcagatagatatgatacttctgttctttcattgtccggcacctcctgacgcttccattatactccggcagttgcaaaaaacgcaaagatgcgattatactatatatatactgatagcaacaaggctccaaccttgccggttgaagccctgttgctgcctttgcgaatgccacttttctgttcgtttgaaattatcgccttagtgggctgtggcattagcaagcgcttttgtttttaccttacggaaaacagcccccgtggccaaaggtattattcaaggtatagattggtgtattaatgagacaatggataatgtttttgtccactccggcggctcttcaggttatgccatggcacagtatttcccaaccaacgggcattttgcattctgtgtttttgatactggaataggtatactcaactcatttcatcaaaaaaactctaaacataatccagcgaacggtctggatgcgataacgttggccttgcaagaaaaagttacatccgatgaaaccacaggacaaggtaacggtatgtggggactctcacaaatcgtgaaagaaaacaacggatcatttactgtttgctcatcgggtgcgaaatatcaatatcgctttggacaagagaaagtgactcagcatggcgaattcaatttagggcctatacatgggaccacatatattgaatttcaagttgattgtagcaaacaaatagatatagcaaaggcattaaattattatttgccgatggacttttgggaagaccaacacacagacgattttgatcgaattgttataaaaattgcagaggagtctagtggtacaggcacacgaattgccggtaatcagatgaggactttggcaatgaatttgcttcgcgaacagcacaatattgccattgattttttaggggttaattttataagctcttcgtatgctgatgaacttataggaaagctagttgccgaaatcggttttgtccaattttgtaagcgggttagcatagaaaatattgccgcttttaatgtgccgattataaacaggtctgttggacagagaatggcacagctttattatgattctagtattccagatagtgcagacgaatgattagtccagagcgctgctatgtgaattttgaaataagagcatcgactatgcgctggcccggctggagatcaccgaagaataaaaaataggcagggatcctcaaaatgaggatccctgccattttttattgggatgtatggtatttataccaacagatcctgctcctcgggatgagtctcaaaccagtgtatggcgtaggaacaggtaggtttagccttgcggccatcctggcgcagagtatcggccaccgcgcgcagaagctgtccggcgattccctgtccccgcagagaaccgtccacaaaggtatggttgatgacagcaatgccctcctgttccgggaaggttacttctgccagcagtttccctgtttcatccgtggcaaaaatccggcccggttctttgcaaaactccataacaaacacctccgacctcagtgtaacaaaaaagtcggacaagagcaactgccatgttcctgccgcctcggcagaagcatggctgttgcagattcgtttatagccccatcacctttcccagcttttcctgtgcctctcgcttggttttatcaaaggcatgggcatagatatccagtgtggtactgggctgggagtgaccaagcagtcctgcaacggtgcggacatccacgccctgggcaatgagcaggctggcgttggtatggcgcaggctgtggacagataagttttgagacaacccgttttccttgagaattttcttgaaacggaaggtaacggtcgtagggaccatgggatcgccgctcggctgccggaagaggtaatcttcctctgtcagggtctgcccttctgcctgttccatctgccaggtacattcctgcttccacgctttcaacagcttgcacatctctttgctgatgtacacccgccggttgccgctggcggttttcggctccttggtaaagatcttctgcccgctgagtttgaccaccgttcgctgcacacggacggtccggtgtctccagtcaatgtctgaccagcgcaggccgcaggcttcgccgcggtgcatcccggtggccagtaccagtttgaagtacacttcatatttcatactttgtgtttccaaatcggcaatcagcttctgcaccgtttcctcgtcggccaccgggcgctctttgcgcatgcctttgggtttgtatacccgccaggccgggttatgggtcaggtaaccttcatccacggcaccggacaagatgctgcacagtgtgttgtgcagtccctccaccgaccgttctgagagtggctgtccgtccgtcagtttaggctatgagcgcatggcttcgtagaaggcacggatgatttccttgcgcagatcggtcagtttgtaatgccccagtgctggcaggatacgccggatatcctgccggtcacgggaataggtactggctgccagcttgcctggggcgatatcccgcagccagtgttcggtatacgctgccagcgtcatggcatggttcacgggctgtgggtcatgccgtacttcccgctcgaacagaactgcctgttcgttcagccattttttgcactggccgggcgtgagatctttcggtggatgtaccgttttctgtgcagctttcaaccggttcccttcgtaatcgtagccgcgggatactacgataagataactgttttgtcctcgttttcggatgcttgccattttgaccactcctttgtgcgtattgacacaaaggataccaacctctgcgatacaaagctatcaccaaacccaacgaagaacggccacgatacttgtgcaaaccgggcaaaacaccaaaagtttgcaaacataactaatagtgaggattctcccaaaagggaaaatcctcactgtgggtgtgccggacaaacaaaaaccccgggcgcattgcccggggaatgttagtcctgcaaagtgtcgtagtattcttcctctgccggtgtcagcagagaatcaaacaacccggcagcctcctctttgcagatatcctgcggatggcagtaggttcgttccagaaaggcggtatctgcgtgtcccagcaggtcggctgctacctgcttgctggtgccatgttccagcagataggtggcgaagaaatgccgcatggtatgcaggtggtattcctcgggaaaaccgttccggtcatacagccgccgcagatggtgactgaaagtattggggtgtaccggtttgccatttcgctggaaaatcaaaccgttccagtcggctccgttgttttccagggcctgctcagtgaacagttctcccagctcgtcgaagacgatctgcggcatgactacgatgcgggtgcggtggttcttggtatcgctctcctgcacaccctgccctaccacggtgctgcgggaatgttggatcttcacctgattcccgccgtgcagatcgctccaccgcaaagcacagagctcaccgcggcgcaggccggtggagagagccatcaggtagtacacccggtagagcagcggctcctgcagaatgcactgcaggagtttttgcatttcccattgttgcggaatccgctgctgtaccttttgcacccggactttttcaacccgatgggcaggattatagagcaggatgtcatttttcgctgcgtcctgcagcacagcggaaacggcatccagatatttatgtacggtgttttcgctcagaggcttgccgccccgcccgggccgcttgcgcagctcctctgcaaattcctccaggaccatgggccggattttgcagagcggcaaaccgccaatgtaagggtatgccacctccagcatttttcggtaaccggccagtgtgctggctttgtatcgcttggctgcccggtccagccaatgctccgcataggtttcaaacttggtgttttcgctttcgtcgatgcctgtacggaatcgtttttccaggcgctcagcctccgcatatacatactgcctgatactgcgttttggaatctccttggggacatcaatggtgcgcgcctgcatccgttttttgcccattgtggtgtagccattacaaactgtaattttacaccttctttctccgcgttgttgaatataggccatgtctgttcctcctttattaagatgcctgtgacgtcagtgacggtgatgacggttgtgacggctgcgacgaaacatccggtatttcaaatcctgtgtcagaagcgtcacaaccgtcattctcgtcatgcggacggcagcaaagctgcagaaggcgctgcttgctggtacgccgggtactcactaaaataccataccttgccagttcctcttcatggctctgcaggtaccgggacagctgagccggcccccataagtttccctcgtcccccagccgggctgtcaattcggtggcagtaccggaaaacggcttgtcggccaacaaacgctgcagagcggacaggagctgaagcatctgcagctgctccggtgagcagcctcggctccagcggcagtcggaaaagtccagcgtcagttccatatcttcgatatcccgtccggtggctgacatcgtagccgtcccttcctggcgtttttggcggtcgagaacgatggatccgtcggcggcaccgttcagcccgttcgttcccgacatctgcttgaaaggatcctcatccttctgtttgcgcagatggtgtacaaccaccatacagatatcgttccggtctgccaccgctttcaaagccgaggcatcccggtagtcgatgctgtaggagggggtggcactggttgcctcccggattttttgcagcgtgtcaataacgaccagcttgacggccgggtgttcagccagcatctgatccagttgctgctccagtccgtggccaatcaaatgcgcatgggtgcaaagatacagaccggcgggagcctcctcggtcagccgcaatgcgcggatatgcagccgccgaggaccgtcctccaaagagatgtaaagaacttcgttccgcttggtctcgaaccccagaaagggctccccacggcagacggacagacagagctgcagtgccagccagctttttcccacttttggtgaaccacccaggaaatataacccaggtgccagcagatcttccaccacccaagggatgggttcgataggctgtttgtagagttcctgaagcgtataggtgtttaatgtgtcctgcattttcatgcctccttttgttgcagcaggtacggggtttggggagagtccccaaatttgtgtttggatatccaaacgctatgctagcaaaaccgtctgccagcaggttgggggcctttgggccccttttccttcccagtcggtgggaaaaagccggtgagaaagtgaatcatgctatgattcactttcctgggctttccctcgtcatgtgaaaaaagtgaatcatgctatgattcactttttctgaaaagcagctgtccttgtgaatcttattaagattcacacctgcctggttcaatcagatagtgaatcttaataagattcactgcccccttgtttaccagcttaatgcgcaaataggaaataaaccttacgatttaaacaaggattcataaagaatttacagatggcatgacaaacactctgttttgcagtcacccataatcagcctatcagctaaatatgccatatcctgacatatttaaaaaatgttctcagaaaattcataatagaaaagctgctttgctgggagcataacagaaaaacctaacaacttttgttacattaaaaaaagtttttttgcattatctccttttgcgctgccatcatagcaggcaaatctcgcaacttttgcgatatttatctcatttttttgaaaaaaggaggaaaagaaagataaaactgctacaatacaaacaaaaagccgccgatcaacggcggcatagacttgcgatacccattataggactggcgttgtgctacaatgtatgtatagaaaagcagatggtcaggaggatggctgccatgaaagactgggatttcggctattttggcaagggaattgatgggtatgtacattatacacagacattcaatcgcaattttccgaaaagttccaagcattccgaagcaaaacgggtggagcaaaagccgcacaatgtgcctcccaaggaagagggaagcttgctgcagagcctggccgaactgggagggctgttcatgatcattgtgatccttcttggtgttttgtcgctcttgcagtaacggaacagaaaggaaatcaggatgccaacgattttgattgacgcagacggctgcccggtggtggacctgacggtgcgaatcggccgggctcacggcgtgccggtgagaatcctctgtgatacggcccatcgcatcgagcgggagggtgctgagacgctggtctttgacaagggagctgacagcgtggactttgcccttgtcaaccgggtgcagtcgggagatattgtcatcacccaggactatgggcttgccggtatgtgcctggcccgacgggccagagtgctcaaccagaacgggctggagtacacagcccagaacattgacggtctgctggcccgtcggcatgaaaacaaaaaactcctccgtgccggcaagcacccgaaagggccagccaaacgcacgagggagcaggatgaggcgttcgccagagcgctggagaatctgttgaaagagtaatggcaaaaggaacaaacaaaacagtcccccgcagcagatgctgcgggggacttggtattattctggaatcggacgaacggcatagcccacttcatccaaccgcatggaaaaggttggaatgccggcacgactgcaaagaaacgcgaggtattgtaatcggatagaattcgtgtagctctttgctaaataccttggctactacaaatgaagtttggaaagtggagaagccattacatatcgataactatcacgactcaaaatggtcggaatgcgacattaatattgtgttagaaaaactcttctttaaagaaatcgtcatcctcttggtccatgttttctgctaatagaacttctacatattcatctaacgagtccgtaacacaattatcccaattattttccgcccttagtttttcggctattctattacgtgttacagcgatagaaaaatactgattaaaactgttagtgagagtggttaaatccatttttccgaatttcgagcaaaaccattctagtacggaactcaaacggaaacaatttcgatcttttgtaagaatatggcctccagtaacacgcatggtgacaactccactctgagctcgcaaaatacaagaaagtagccattcattgtcttttaatttctgcgctacaggattattttgcagtatgccaaacaataaagtgtgagcgttaaaatatttttctgttgcacaggtgcaaactagttgttgcaactgccgcgcttcttctattgaaatatcgtatcttctcgatacctcgtcaaatgacattaacactctaggggcaacatcaatatattcgagatcaaacctttttttatccaatgttgaggtaaatacatttagacgcaataagcgtgggtccaagaccgcaaggtcaaccaccttattagaaaatatttctgtattcaaatagcccaccatagacccataggtttctttaaacgcataactactatttaagatatagcctatacgcttaaaggcagcgacatttaaagattttagggatgtataagaacagcatttcaataataactgctctaattcatccatgaaccatagggacttctcttttaatgcgttcaataggctgggaacatcacgcgggtcgattgcaggcacatcgattatatattttccgttgacgtagtatttagaaagtggttctgtgagatgcggatttccaggagcagtatccctacgaacaccataaagatcttcataagcagcaaaataatcctcaaaactcacgggagaaatggcctgaagaagtttaattgcttgcaatccttcgtcaccatttcctatgatcataatcgggactctgcgaaacgatacccggaggcttgggcttatccaatttgattcaattgaattattgcttgtcgattttaatatataaaataattcatacccatctctaatgtcttgagattccatcaagtcagaataatcccggaaaagcaactcagaagagatcacagaatcattatacgaggtgaattgaatactcttccaaatcaattctgcatcagcttgacagtaccgaatgcaactattagcattaaaaacaatatttttggaaccacgcaagaaattaagtagtgtgcgaatattaacctgttgttgctcagcaagtaaattattatgatatgtgtattctttatatgccttaacaaactcgtctaccgacatagcacgatcctgattttcaatcaggacgagaagcgaaatctgttctcttgataaagatcgagattcttgaattaaaacagctttttcgaagcgctctttaaaaatgcctgtataggcatgaactgaatcccgtgaaatggaaagtgtcccttttttataacgaatgtttaggtattcatagctggttgtacttgcctttgcaaaaaattgtaagaattcatccttggaaagggaaaaatacgtgaacggctcggagagataatcgtcaaacaagagtggcatgcgatttatgattttttgcacaatctggcgaactcgttcacgtgtcaccccaaacgattcagcaatttcttgcagagtttttcccttgagtctttcagtaaacatcgcatattttctattataaggatcatccatttcctcatgaatgtagcttgtaatagtaggccgcgtgacataacagtaatttatattgtttgttagatctggacaatcgaaaaatttatcttcgagaacttcggccggaatatcaataggatatttctcgatttcggatcgcaatttttctgattcaactataccgcgtggaataattttcaaaaatagttccttaattccactttgcaattctggtaggtccagaactgctcggtaattttccatagtgatactcatgtaaccgccagccgttatgcaatcgaacaagtttgaagcttttgctgatcgaataagcgttgcggttgaaaccggcttgattggagcaatactattttttattctttggaaatactggacctcttcagagctatcatctagttgggaatcttgcgataaaaaggggagcagattgtttgaaatccattgatcaactgattgaatgatttctgagccggtttttatacctagattatgaattccagaaaaatcgttttgaatagcaccaattacatcaaaaatagttgttttaccagcacgatacatacaattaaaagcacgtacggacaaattcaattccgaaatatcgtgtaaagtcagttcttcaatctgctcttcggaaaatgtatactttttattttcgttttctgtatttttgccagctgtgtccgttccctcagaaggaacagaacaattcgctgttatttccgaattggccgtgagctgttggaattttctaatttcttcaacagttttaacgccaaccttgtcccaagatgcgagttcatccaaagaaagtttctgcagatcttctaaagttataattccatgctggaaaagacgattcctagcccgtgctgacaaattatattgatctaaattggtcgttgacatcatatcaccattagaagttaaaattcaggccgaaataaatcgtcttcgtttactgcttgcacttcagtttgagaatactggtcgaacactgctttgtaagcataatcaacaatatcattttggtctgcgctagcatcgctagcaaagttattgtaaataatgtctatacccccatagacataggagttgaaaaggtcaaaagcttctttcattgaattaacctcttcgtctgtaatgggaggtacagctagatcatcgcgtttgtcacgatatctaaagcaaatgttgattcgttcttgttcggtccagtctttgagtttgtcagacagaattacgagtttaaagatctcatggcatttaacattttcggtattaaatgcgtcagaataaattcttgcgcggtctgtagaatctccagcttgtgcagttttgccgtttaatacgcccactacggcacccatcatatatacatctatataccgtgtgaatgcgtgtgcctcattgactaaaaattttatctgggttgcaggcgtacctgtaattgtaagatcactatcaaacattcagttgcacctctctttatacaatttctgtatgagactcagaaattttctttagattacagtattttccgacgcgatcacacataacagaccgtgcatattgccaatccttctccatgacaaacataatcacttgattggctacttcagggagtacactagaaatgttttttatatgagtttcgtctgcgtttgaaaaaggagcatccataacaagaggatatgcttcattttcccacgaaatagaatcatcttcatctcgtcccagggaagctttttccttggctaaatctacaaggcccgcaatgaaagcaaaatttttaacacgtttcaagccttctgattcacctgtaacaacgtctctaccgttcaaattggcaagcaaagttacatggtattgcttatcaatttgtacttttctcttgccatggtacattttagcaaaaattgcattaacacgctcttgcagtttgtcccgcatttcttgctcttttttcaaatatgtatcatcaatccaacggcaaatttcctctgcataagcgatataggtaatgagctttttgttccgcgcagaagcagcaattaaaccatcatatactttttgtgcagaagcaatagcgccttcactagcaccaatatcgcgattgcagcggccttttttctcgctcaactgacgaatgcttgcttttatccgatccagatctgcctgatagccgctcatattttccttgccagaaatacttttctctatctgcgaaatatcgctctctaatctgttgaccaagtcacgatgtgcctggatctctttgtattgatgctcaattgttggatagaaattcttgacgctgcgacggtcatttgtcaaaagatttctaaagttttgaatggcagttccaatatgagcagggggaagatagttaagctcttcgattatatgtcgataggcatcattccctgtatttgtttcgggattaaacgtaattggagcaccgcaaatacagcgccctcttcggataatatctcgaatcgaggattctgtcatatctcgaattccgcgggtatccaatttggcgtttgcaagaatttgctcggccttttctatgagggggagcataaagtatgttaatccagttgtgctgtacagactaagcagaagccggttgccttgactgatcgccgtatgctcctgttcaagttgttgctcgagagcttgcttctttctttgcagttcggcagtactttgattggcacgaagaagttcttctatacgttctttttgtatctgtaaatcagaaatttctttatccgcatttgaaatttcatccttacattttgcaattttctcggtttcaagtgcaatggtctcttgggcttgctttgctcttgcatcaccaagggaatccagtgatgaattccactgcccaatagcagttcgacctaaagtccgttcgccgagatgcttgcgggcatttccaacagctgctagaccaagcaatcctctaacggcgcttgataaatcgctccgagagctgatgtccgaaacgcgttctgtatcaaaaaagaagtaacctgacagagattgtgggaggatcgcattaattacgttcctctcctcgccttcgcggacttgtttcgtgataccttggtctttgatagaaatggacagcttggaattaagcggcgaccaattattataaccgcgatcaatataaacctgttttctcaagataatgtactcactgcttttatgttcgagtacaagttccacagaaacttcgatcttctgttggacacccgactgttcattcgctgtttccaaatttaaaaggaactcaggattgctatctttcgggaaatctgcagttccgtacaggcaccaattaaatgcttgaagaatagtggttttgccaaaagtattgtctccaagaagcacagtgacatttttctctggttcaatagaaaattctaaagtttgccgccctttaaactgtctaaaattattgagcgtaatactttttatgagcattttattgaaccccctgatcaacgcatttttcaatgatttttttgataagctttaccatgtcttgtgtcgttttttcgctggtattgatatttttccgctcatttaggattatcagctgtttcatgtggtttagcttctttgcgtcaatgggaacttttttaatttcatcagacaacatcagtttttacctcctcaccattaagatcttcttctgtgattccgaagtcttgcttaagttcaaataccaacttatatgtttcagatggattttcagcgatttccgcaaaatcgagcattctaattagttctcgacgaattaatcctttggaagaattaatggtatctgatgattgattatttagagtattcttgctaaatggaagcgtaacaaaatcgtagatgtcagcgtgcgtctttcctgggaattttcgtaggacacgtccacgtctttgaatgtattctttcggatttgtgctgctcgctaatataaaagcagttttgatgcttggtatatttacaccctcgtcgagacattttatggcaacaagcgcctgtaaaacatcaccgtctgcgaaggcttctcgtatctgcatgcgttcttgaggagtttcttgtgaagtaaagcgtccgacacgcatctgcattctgttgcctaataaatccgcaacaagatcaatttgccgcatagaaaaagcaagatcatcatcggagtcttttactgtagtagcgccgcaataaacaagaatatgcttatcatggataaagggggttatttttcccgctaatttatcaagtttgtctcgtgctccagcaataatacgagaacgtttgatcaataactgtttggcttgctctgagagaacaatttttccttttctcttcgtcagaaattttgctagttgatgtgtaattgtcagataatcatctaactcttcgggatacaaatatgtgatcacaggatgataatagtaaggggtcagcatattgttggcgattgcttcgcgaagagaatacgcaatacactttggaccgaaataatcaataagtgcctgtgtaccagactcatcattgtggcgatcaattgttgctgacagcgctaagcgatatacaatttgctctggtaagtattttcggtatgtgcctgctccaaggttgtgtgcttcatccacgacaaaaacagtatctttcgacaaaagatttatttgattctgaattgcactcgtaataaatgaggcattcgtcgtaataaaacacagcaggttagaaacgtgaagattaaaagatcggactgcttgctctaaatttttcttccagtgcttttgaggtgactttgagtaccctattattggatggataccaaatcttacaatatcttctacccattgctctaccaggtgctgatacgggcagagaatgattatagccaatcggtcaccattatcacggtataattgttctacactagctagagcagttagtgtttttcccgttccggttgccatgtcataaatgccacggtagtgattactcttccaactttcaattgcctgttcttgataatctcgaatgacaaaatcggtaggaagatgcattttgtcaggaccttcggatacaggatggttttccatttcggttgaagacggctttcttaccgttacagttttagctaattgcggattgtatttatacaattcgctctttacagcatcaggaaaagcgagagtttctataccgggctcgtaatcctcccatatagcttgaaatgccatctttttttggaacacacgtgatgagtcagctgtccaagaacaaaacacatcaaatgcttcataattaccgtggaacgcattttcggtttcattcatggagccagagaatgccacagaatcgccagacgcatcagtcataattcccattttttcatggtacagggatatttcattgttagcagataaaaacgctattttgatatctagtgttccctgtgcaatcagttgggcaatatatgataagcgttgtatttcgtgctcgctggtcacatctcttatttcacggatcagtgcatttgttataatttcacgtacagcatagcctttttttatttcttctatatcattttcagataaccggggagaggcaatcacttgtattttaccgccgttttggacaaggccgtcaatgcctttagcaagcattactaatgccgatgaagaaaaaaagccgactgcccgctgatagaaaacagactctcttagtaggggaatataaaaatcattaactacatcgtcaatgagagatctatattcattctttatgtccagttccctaaagcccatagtattgttactcctaatcacaggttatcttcaatgtcatcaagtgcacgttttaagacttcgaagtcactatccgaggtgaaatgatttacactaaaacgtatcgtgccagcagggaaggtgccaaggaaccgatgggcaagtggagcgcagtgtagacctgtacgaacagcaacatctctttcgctaaaaagctgtccagcaatatcactgctaattccttcaattaaacaagaaacgattccgacataatgctgcttttctgagtttcctataatttgaatgaagtcatattgagaaagtaactcaagaagtttgtcgcgagcttttatctcctctgtatagagcgttccaattccataagattcgatccaagataacgccgcatttaaacctgcaactccagaaatattcatcgttcccatctcgtatctttctggaaggctatctggcatatctggattcgcagaatcgtatccagttccaccgaaaataacaggctgtaaagttatagttggcttcataacaaagccggataaacctgttggcccaagtagtgttttgtgaccagcaaagactgcaaaatcatattggtctttacctatttcgcactcaactaggccggctgtttgagacatatctaatacgttgatcgcattatactttttagacaaaacaaaaatttcgtcaacgggcgcaatgagcccaatcacattactggcgtggctaacgacaacgagatctgggtgattagcgtcgaattgatactgaatgcgctgcagatcataggaaaagtcatttcccactgctaattggcgcacttgaatttcgcgattagcctcataatgatgtagtgtacgggttacggcattatgctcaaacgggctaatatatacatttcggatattaggacctattagcccctgaagtataatatttagtgagattgtggccgtgggctcaaaaatcacctgtttgttggggcaatgtaaaagcttctgtatcttgtttcgggtatcagtaactacttgtttgacggatttagataagctataatttcctcttccaaagctgccacccgaagctctgtaaaatgtgtccatgtaatcataaacgcattggggcttgggatatgtggttgccgcgttatcaaagtaggccacttttataccttccttagcacaactcttttaagatttcaatgaggacttgccgcttctcctgggctgtaattgattgtcccattacctgcaaagaatgcgtaatttgattatagagcaactttgaacgaacactggtttgaatccgctcaaaactctttgttaccgcgttgccagcctcatcgtgaaaggtgatttgataatcgctgatgggggcggtagagttctctatcgaaacagaagaatggtaagcttctattgttgccttatgttgttgaagcttttcaagaaacgctgaaatagtgttcctatcccaatcctcaattcgcaatccagtttcggctttggcaaggcgagcaacaaatagttgttcatcattagaaacacttttaaataacgtcaaacatttctctgcaccatctgggaagaggtgtgtgaatgcgccctcatctacagattcacaccaatcttgaattgttgaggctagtgacattttagaagcctgtgccacattttgcggtaacataaaaatattctttatttttgctccaagagactgcaacaaaccgcgaattaatctatcgtagaatagtttggcggaagcaatattttcactcatgccgactgaaacatttttttcataaccaaagacttttggcaatttttcaaatagaagctcatatccgcttgtggtttgccgtaaagcctttaaaaatgcagtatatcgctcatcaatttttttgccattgggtaaaaccttgcactctttagaatacttaggaagcgacatcatccaacgcttcattgcgtttactacatagtcgtatgtgttcgcatttttttcagactcaacgatatattctgaaaattcccgcgagagatgatcaataagttcttctttatcagcactccaatccacataggacaaaaagaacccttggggatcagcattaatctgctgcaaagtatccgctgatatggggacttgaccgaacttatctgtgataaccagctgccttctatactcactaaggactgctgccaaatataccggaattacacctttacggagtccaatatggccacttggagatataagcctagaataaagaacactaaaaggctgaggattgcttgtccgagcattaactacgaaatcactgattaccgaaagcatattttctatatttttatctgaaggatgcaaatcaatatatggattgccgtaagcatctttcaaaatgccagtgcgtacaagagtactgcgcataatagaaacatcttgtcctgtaccggttaaacctagtgatggttctagctggttccgcaataatgctgtgatgatcttacttctgctattatttgcgattgaagttatttcatctttattgagggcttcattactaattacgggcgtcaaactatagacttgatcgcaaatggttgaaagcaattctgtaagagccgacttgcggttaaccgaaacctgttccccattataaatatagtccgacttaaaagtttcaggatgagtatatcctgaaacaaactgattaataacttcctgcaaatcttcgtaaattacctcgtattcatcataaaggattggatcattggatgcctctgcctttaatgaaaaaactgcttgatattgataagcgattttttcaatatcgagataatgttttggaagaacgaatacatttctggatgcgtttttacttgtgagaaacaaactatttttgatgttcgaaatacttaaatcactattgggtatgatagcaaaaactataccatccccggcatagctttcgcttttaacttcccaatttgtttcattggttacctctgattcatcaataaaaacaaacgaaaaatatcgcgtcatatcgtgctcatcattgtatcttgacggatacataaaaagatcaaaatttgcgcgatttagaatgtcttttacaaatagttttgaagcgtgcgattcaacataatcgctaattttgctcagaatatctacgccagagctctgttttaagcgtaaatagttattactctgttttaaatagacaacgtatttgttttcgattaggttgtctattgcatcgttaatctcttctattgaaaaagagggcgtataaatgtttatgagttcttcctttgtcggtttcaggcgttcatgttgtcccaaaatgtagatcaaagagatggtttttacaatttttgcctccaatgaaagaggaactaactctgtcaaaattttttctgtgaggatatattgattgtaaatatcgcctccgtaagactcctttttaaataatggctcaaagtagtcatagattatgtctggagtaagcaatgagaaacagctgtcaggggcttcggctaaaaaggcatgcagcgttgacacaccttcagcagaaagaaaggtaaacaacgttctctcattttgggcaaccttttcagacaggcgaggaagaataaaagttgatacaggatgtaatggataacaaccataaatgaccgtgctgagctcggtatcatgatcagagaaaagagggtgattctgatattttttcaaaaggctttcgaagtcttttgcgtataaattcgtaaaggattcccacgctatcgggtctttttgaataacagacgcaatcacttcgtaaacctgagaaaaattattgcttagatgaatgtgcttgaatctttctgatactccacgccatccatccaccttttgcttaggtaacttgtcaatgtaattagaaatttctttgtgagaaatcagcataaggtgcatttggatctcgccgctacgattacatttctcggcaaaatcttgtagcatcttcgtatcactaacagaggctttctcaatatttgcctctagaaatttgctgaattcatcatagaccacatacaagccagtatatccttgcgctttgatacttttggctacactttcatacaattcaacaacatcaaaccctaagaatggattaaagatgctgcccgcagtaagggtaggataaatcctttcgaaggtttcatatgagtttatattgaaattttctagtttatcaacaaagttgttgatcggttcttcaatggcggcctcaaactgtttataggtttcaggaaagtcttttttccaccggttaattacggtaatagcagcatgataattcgtttcgggcattacatcaagcattccgttttccgataaagtgcgctgtagagctaaaatgaatgcctgggttaggcttgtattacttccagtaatgactaccggaagtatcttgttatcgctactataatagttctggatgagttgaaaaagctttggattatcctgaattttcggcagagttttttcaaaaagatttaaatcccgtttaagaagaaccgaaagaatcattaaaatgatatgggatttccctttgccataagcgccaattaaaatcctggatctttctgtagaagaactaaaagtgctgtttaatatttcttctaacagctggagtgcagactgtgttgggataaaatttttcaatttatcggtgttgtttaggtcataaccaatatttattgagtattggaatcccgaagcaacggaaatcattttgctcattattttatctcccaattgagttcattgatgctttcatagtagtggttcacacagtcttgaaacgtatagtctgataagaggcgaataacatccaagccagatgttcgattgatttttatagctccagttttttcaagcctatataggacatccaacattgttattgtatcgagattaaagacacgacctatgttgcaaggcgaattcagaagatcatttagcgggatttccttcttttgctgggactgatctacgataattgctagtataatccatgggttaaacgtcgtagctggaggaatagatttttgataggtcctcttttcggcattagcaatatcaatcagaccgagttcgcctaaaggacaatcgatattcgtttcagggcttaccttgttagggtttgacttgtatcttggcaaataggtgttaataatgcaagaaaaatcatcatttagggaacggatagcaacgatctcagaagaatcaagcatcttgatataactctgaagagcaccaacaaaatcatctctgctaaactcggacatattgaattcattaaaaaaataataccaagcagtagcgttatctctattgcatgctagtcggtactgtaacagataaagtgttccaaattcttctatatagcggtcatatttgtatatactttctcccaagggggtcaaccgctgtattcgttttcctgttgtagactcactagtcagcccgacagcttggagccaatatcgcatggcttttaccatgttggagccaatacctaatatatccatcgggttttcatctttagcaataaagatatctggccgttggacaacatatcgcatgcccttacttagccagccctttctaataaaaaatgtatcatgggcccggaacttcattgagatgtgtaaacctccatgcttttatttggttctcaagtatttttccatcatgcatccgccactgagatatttagcagtcatgcacgctttacaatgcacacatttatttggatcaatataatatcctaggctactaatcgatattgctccagcgcggcaaatggactcacattttagacatttacgacacgcattgaatttccgaatctgatagccaaccatacgctgcagatcttcatggtcagcaacgttcattgttcggacttttacggcataggcatatccgtcttgttgaaatggttgcaaagagagaatcggaacatttgttttgggttcgagcacgattacttctttgagaagttttttgcccaattccggcgcgactcttccaaacggtgtaaacataccgatcaattcgtcatcgaagggtctagttaaacgataaattttggcgtgctcttcagctgtacaattcgtaaacttgattttaacatcgccagcagattttaagccgttgccaccctggcgcgccttccattttcctgaatcgacatatacttcaggatcggttttcccaattttttgggcaaaactgattaaaaaattacgccatcttttagactgctcgggcatataaatgcgggaaagaaattgggcgcgttgattattgttcggacagcaccagcaaccaactcgatcatatccaaggcgataagcgtcgttaaaatctatgttttcagaaaaaatataaagccaaatgtcaatatctctccagaaaaaaatgggagaagcaaccgtctgttgcttgatttttatggattcggcattatcttcgatacggttatacttgcttctgcttacagattctgctttccttatcccataaaacgttaaaatttgctgactaccatagagactattgattacacgtgtaataggcccagtcttaaacatagaacaacaccagcgcatcatacgtgctggtggtccaatgtcgtcacacacatcatagaagttttgatcttcatttttcgctactataaaaatggcattgggatgatttgcacggaatcgttcagcatattctgttgtgcttggaaattctagagtggtatcgccaaaaatatgcaccagactagggttgctcaaggcctttactgcaagatcggcagtaactgtagaatcctttccgccagagaaggaaaggactatgctttcttctggaaatttttctgcagcggtttggatgaactgaaaagcttcatctttcagataattgaaacgtaatttgttagccctgacaaagtcgtcaatgtatttgttgaaccatttgtaagtgttctcggaagcgttcttctgaagttcacttgagagaacatctgtattttttgtttcatataatttattgggaatagagataggtttcccatcaataaaatacctgttattacatgcccaaacagacttctctttccagatattcggggtgtgtccaagtatgatttccagcaataaccgctcttctggaaaaactggacgtatatccgtagaaagatattttgtcttgcttccacaaagtggacagtggaagtcactagattgcgagtgcttaacaattataggtatattacaatgggaacaccaatgaatttcgataggtgggtcttcaattgttaactcaccacagatggggcaaacagatgaatttgtctctatattacacctcttacaccacattacttagttcctttcaaaacaacgctagaaggcaaattcgctcattaaaatcaggtggataaatagtaaatatatataaaaaagtataccatatatcgcttatccattcaaggagacgtatcggaaccgctctaggaaaaggccttggacaggctccaaattaatggtatgttggcaacgtctttgatcacttttagtataatagataaagcgggtattaaatcggacttagaggatttttcttacttaggtaggggtgatgagtaaagcttttaatgtgagccctttaatggtggaggtaataactttatgaggttaccaattgttcgagaaaatcaattactgcatagcctttcccatgctactatgctataatttttttgaaaaaaggcggaaagcagtgataatatggccgtggaaaatggggaatggatcatgcggggtccagcttgggaggatccaacttgcatccatagctggcaggaactcgttgattggatcgacgaggtgggatttctgcccctgttccgtaacggcatcaacggtttttcggcggaggagcgcacctgtcctcaggactggtggagtggcgatgtgaatcgtgatccctgggagtggcggcagatgattgcccgcagcggtctggtggcctacggtaagtttttcggtaagaaagcgggttttatctccaaagcttggtttccggattttgccaactggcggcgggacggctacgactttgatagccggtgggacgatggcctcgcaaccgcccgccagaagaagatcatggaccagttctccgatgcagacgccctgctttcctatgaactcaaagaacgggctggattcggcaagggcggagagaagaatttcgaaggcaccgtgaccgatctgcagatgagtagttatttgattatccgggatttccgtcagaaactgaacaaaaaaggccagccttacggctggccccgggcagaatatacgacgccggaagctctatggggaacggagtacattgctgcagcctacgctaccgactcggccaagtcccggacgaaggtgttccgccagattcagaaccattttcccgccgccacagagaaatccctggggatggtcttggaaaatagaaaatgaaatcaatttgtgcccttatccatttctgtaattgtttgacaaaaggtttgttactactatgtgcagatctgttgtatgcggatacgaattaataccatgcactatcacgctagagaaggcttgttatggaagcttccgttttttccaagatgctctcggaccccggacggctggacctcaaaaagatggggtataaatatggtcaggaaaatctgcaagaattcctcgcactgcacaagcagtatttctatcaggaactgcccctgcatgactttgacggaaatcccatggtatacctggatcaggcagtacaaattccgctgtcagcggctcgtgttttgctgacgccgcaacagagtacccgtctgtatggaaccaaggcgatggaagaggaaatcctgtccacgttccagatcgaacaaattgacaccagcagagaaagcgtgcgtcggattttatctggacagacgcccagggatgacgaggaacatcgtatctatggtatgaaacaggggctggaatttatcgcagatatttccaactccataacagaggagaatctcttccgactgtatcagatgaccattggagactttctgtcggaggaagatcgtctgcttccgggccattggtatcgccatgacggagtgacggttattgacagcaaaacggaacacatcgggttgccctggcagaagctgccggtctacatgaaagaactggtggcgtttgctgccgaaaaagcagcacagaatgacctgatcaaagcggctattttgcatttcgcacttgcctatctgcatccctactttgacggaaatggtcggatggcgcgtctgctccatttgtggtatctggtgcagcagggatactcgtcagtactgttcgtgccgatgtcccgctttgtggaggaaagttgctcccggtattataaagcgtacacgcaagtggaacagaatcagcagatcagcggtgtgctggatgtgacgccgttcctggtctattttgcggaatctgtgtattaccggctgggaaaagagcagccgtaatcccgggcgctgcagcctttcgatgaaacgctgcaggaaggttaccaagaagtgggcacagcttatcttcatgagatgccatagcgaagaaagaagagcgaagctatctgcttaccgatcagaatgatggtgagaaatacaattatgggctctttgtaggtaggtttgccaggattgaaaagggagacgaatgtaatgtttggaaatggaatgcaaaagccagaacagtcgttgattattgtgtgtgatgagaaggatattgcctatgccaactacctaattcaactcataggtcagaaggatgatacaggggaaagtgttgtgggagttgcagatgatagtgtttccgctgctatctatacagttaagacttacaaggataatttggcacaaatcccgtcattgcagcatattctctttattggacaaacccgtgtgatgaaggagcagagcaaaaccatcgttgaacaatttgatgacctgggaatgcactacgggtggcttgggaaacgagcggtgctatacatagataattctgcaaatgaatggattaaactccaggacgataagaaaacctataccaaatttttgcagttcagtgaggcacgcgggacgcaccatccagatgctctcgcgaaatatgaaaagaagcgaaacaacgtgttaataaacgtcattatgccaattgttgttaatgcaacagctattgttagtacatcaaaaatgctctatgatcacaataagacattatgtgagatcaaggaccagcagtataggactctaatcaaagtgttttacgaggatgggttaagatcctttatggagggataaccaatgaacgcctttgaggagggctataccttttttgcaaagcaagcgggtgttcaaattgcagggtatgaaggcagcatatatgttgggaaagttgacgacgaaattgccaagctgttgcaagacctaaatgcgtttgatggtttcaaaacagagccggatatgctcaagggagacatagcagaattctggcattcaaatactttcaatatcaatgcggtagctcgaggaatagataatcgcaccttcgtagatcgcagtcatgattttgcttcaccggatatcagcagtaactttagaaaactcttcggattgaaatactataaagatggggcatcaagcgcacagcaacaggcaaaaagtgtttttgataggttccatgagtatcgtttgtccggcggtaaagatgagctagagctatatcttgaaaaacgtggatttacggatgagtctgtcctccatgacccaatctacaccgggcaggtacgagtgattccaaaggatcagctggagagcgcttgtgaatggcttaaacgaaagattgcgaaagaatcagctatccgtccagagcaagttgctaaatatcaggatacactcaatatgctttctgaccgcctcagtgacgggcaaggtacagagtctatcccactttccgaagcagatgcaaaagcccttgcagttttggcaaaaaagggtgatgtgacagctgaggaattaaaatcgctgggaatttcagctgatgaagtaatccgtttcgaatatcttgcacagcaggcattcaagtctggtcttaccgcagcaactatttctgttgttttgaatgtggcaccggaggtttaccgggcaattagctacttaatacagaatggtgaactggatgaaaaacagtttcagcgcataggctttgccgctctcaaaggtagtagcgagggctttgtcagagggtcaatctctgcagcgatcacaattgcctgtaaatcaggaatgctaggagaggcattgaaaggaatatctcctcctattgtgggtatggcaactgtacttgcaatggacactatgaagaatgcctataaagtagccgctggtcagatgtctcgcactgaattggccagcgagttggttagagaactcattgtgtcctcggcctctcttgccggtggagcaatggtacaagcctttattgagatccctgtggtgggttttatgattggcagttttgttggctcagtaatcggatctttcgtttacaactgtggatatagtacggccctgagcttctgtgttgatacagggtttaccatgttcggtcttgtgaaacaaaactatactcttcccaaggatatcatggaagcgattggccttgtagtatttcaatacgaacagtttacaccgcaacaatttgaaccacggtcattttcccccacaaaattcaaccccaagggcattgcgactgatacgctgggaatccacatcttacgccgtggggtaattggtgtttctgaagtgggttatatttaagaaaatctgatcatattaagtaggcgacactagcatcaccaataaagggttggtggtgattgcagtgttggagtgcatggtccaccctgccaacgtcgattctcgcaccgaatactcagtgctggacattggtacggattgggaagcgcgaaaatccgaaagctcctgaccaccatctgaccactccttcttctcagccggtctcgtttgtcgttttttacgtcccaacattcttttataaccaccacaaacagcgccggaagttgtgcacactacacaatttccggcgctgtatcattgtatttccctgtctgtcacagttctccgactccaaaggccagaggttcgaatccccccggccgcaccaagagcagcatctttatggatgctgctcttttttgttgtatccgggatctttcagccacaatagcactccgtcgcattctacacaaaaaaccaccccgggccctgcgcacagtacactgggtcccggggtggtaaaagccggatgtttattctgttgcattatcctcttccggagaggagcggacgcagtacaccacatagcgctggctgttgccgcccagagggtggcaggtcaccagggtcagcaggtcgcgcccgggctggatcagcagcgcttccacgtcggaaggatcaatgatgcgcagctcatccacggtgtaggtcagtgtttcccggaaattctgcacatacacggtatccccgctctgcaggtgctccacctcccgcagcatgggggctttataatagccccggtgagcggccagcacgcagttggtgttctcgccgccgatgggataggaggtctgggtcaggtgcgcggccccctgtttcaggtgctcctcgttggcgcccagcacaatgggcagttccaggtccagtgcggggatctgcacaaagccgatgatgtcatcctgcaggccgtattccgccagggaaatgccgggttcttcataggagaaggggtcccgcaggtcggcctggctggtctcgtacagcgtttggttcctgttttgcaggtcacggtacaggcgttccagcggatcgtcggcgtcccgggccgaggcattggtctcatcgtcaaaccgtgttttctgctccgtcacctggcggctatactgccaggccgtccagcgcggatacaacagcagggctgctcccattcccagcaggatcacagccaccgccaacagcccatagggacggcgggcattattcatggcgttttcctcctttggcggaactgcgcagaaaacggcaggccagcagcagggcaatggcaaagcacaaagccccggcgccgaacaaaataccagtcagaaaatagaaggtggtggtttccccgcccagcaggcggacggactccgcctgtgcggtctgttcctcctccggcacataggggacccgggtgccgcgcaccagcaaccggtgggtattgatgccgtacggggtacaggtcaccagcgtcacgtagtcctgtccgggctccgccaccagattttccagctcctggggttccaccgtcaggatctggtccacctggtaggccagggtggcgtccagcacatggatataaaaccggtctccctgttctagctcatccagccgggtaaacagttccgcactgggcagcccccggtgacccgtcagcacggcatggcggtattcgccgccgatgggcagggatgtggactcgatgtgtcccacccctttttccagggtctccgcatcggtgccgtggtaaatgggcaggtccacatcgattttggggatggtgatgcgtcccatcacgccgtccaggttcagcacgtccatgtaattatcgggcagggcatagccgctgccgggcacaaacgggtcgtggacggggtctccggccaggttttcgttgtactcctcagctttggcccattcttccgccaaaaagtcctcgtcctgcccggcgacggcctgttcatagttctgcaccacctgggcctggtttttctgattcagataattgctgaccgccgggtagcagaacacggcggcgccgccaaaaaacagtgccagagcggcggccatgggcacgatggaagagagtcgcatgaagttcctttcctgagcagcgggagagccggaaaattgcgggccgcgtgcctgcggttattcctggcggttgcggcggcgcagataaagcagcagcaacacaaggccgccgcccatcagaacggtgccgatggcggtgaacagcatcgtgcccataccgccggtggagggcagagtaaagcccttgccgttttccaccgtgagttcgacataaccgtcggtgccgtcagcactggcggaaccgtcgtccaccaggccgttggagttggcgtcggtgatggtgatggtcacgggagcagacagcttgatatatccagcgggggctttcgtctcggtcagctcataggtgcccacatccaggccggagagcaccagtttgcccattttgtctccgctggcgccgactgcgagggtcgcgctgccgctctccgcggcggtcgcaacacggtagacgccgttttcgctgacaaaactgatctcgccggactcgccgctctttttcagcgtaaattccgcaccgggaagcagcgctctgtcgcttttatcgactttctgcaccatgatgccatagctgtagaccgcggcggtatccgtttgggtctgccaggtgggcacagcgccgtacggattattattgtaatccagataggcggtgtttacgttgcctttgacattgttgtcctggccgatggtcttgaggtttgcgttggccgttgcggtatagactacgcgaattttcgtatagtctttgatcgcgttatacgtgaaatccaggttgaacgtgacgctcggggtatcggtcacggggcgttttgcgctgtcggtggtcaaagtgtaccccgactcgtcaatggcgtccccttccgcaatattcggcgcattttcggccaggccgtaaactttcacgctggttttattcaacgtcatgccttcgggcagattatcgctgatatgataaccggtgttgtcggcatcggcgggatacgcgggaacatcggccaccagcatataggtgacagtatccccgatctttacctgtgcatagtcggaaccgccgttttcataatccagttgctcaagcgcctgtccctggttgtcatagacggttttgagcagggtcagggcctgagactttgccgtcacattcttttccaggtcgttcagtacccaggtatccttttcttcatcccacgtaggcacgatgctcacgaaaaccggctcatagattttcgtgccgccctccagcaggataaggtaggcgcccatttccagattggaaagtgtgatcggatcggtgccggtggccgtggcggcggcggtcagtccggtaatctcgacgcccccgcggatggcctgggccatgtccccggcaaaggttttcatctgttcggcggagaccttgccgtccttgaaggtttccgggacggacttgtcagccgaggtgatgtacgacgaataggagccggtcacccagtctgcaaccgcattcacccagtaaaactcagggcttttgggcacgttgccatcatagtcataatccacccgaatgacccgataagccgttgcggtgacactgttttcctcggcatcccctccttcccagtcgaggatgatcttgcctttctgccccgaggtgatcccgtaagtttccggttcctccgcccatacaggcaggcccaggcagaacgccaatgccagagccaggcacagggctgcccactgctgcatctttttcttcatacgtcagatactctcctttttcactgctcgtgtgtcacttcttttccgtcttaccgcgtctgttttggatctgtctgccggccaaaaccaggcccaggcccatcatcagcacacccagagcggcagccagcggaacgccggggccgcccgaactgggcatatccatgggtctgcggttggtcagcttcaaaacgtcgccttctttcaggaaggcaggcggattctggatccccacaagttcggccgcgccatcggccttcagggtgacctgccactgccccacaggcagtgcatagcctcccggagccttggtctctaccagtcggtaggtgccggcggcgagatcccggaaggtcaccacaccatcggctccgctgacaacagcctcctgggtgaccttgacccagcaggggccggggttttcctggtccagcaggtcgctgtgcgtatggctcgtgtcgccgcaggccagcgcatacagggcaaattcggcgccggggagcactttttcattgtcctccgccgccactttggtaaatgtaaaggtcagcggtctgctgttctgcaccgtaaccttgaccacatctttcagatgttccgcccccagggtaatatcggtgggggtcagggacatctggtatcctgcaggggcctgcgtttcggtcagacggtagcggccggggcgcagcccggtaaaggtataggtcccgtcggtgtcggtggtgcccgtctgggccgtccagcccgtatccacgatccactcgccttccgccgtctgcatcagccgttccagcttgaacccggcgcccgtcagcagcagattgctgtcctgggcgtccagtttgatgacctggatggcggcggttttcagggcgttttccaccgtcagggtggccgcttcgcccagagtcacgggcaggctgtaggcgggttcgtaggtgttgtcggcctctatgggcttccagatgccgtcgctgccctgcatctgcacttcctgcagacggtaataatagggttttgactgcccatctgccatgcccgaggccggcagcccgctcatcgcatggctccagtccggggcacgcagttcgataaacgtatccgcccctgccgccgctccggtctcatccacggtctcccaggtggacgggccggtggggtcttcggggtcgtaatccagggagcgctgcaggcgtacccgcacggcggccggccgggtatcgtcccggttctggttatccagccaggtcttttgcagggtcagaccggtggggatgttgcgggcctggtaggtaaccaccggcgtgccgtcggaggttccgccgtccacctcggtatattccacgcggtagctggcaagcgcgccctcccccacgccgatctccacaatgcggtattcgtagaggaagccctgatcctgttcgctgtctccctgtgtgggcagcgtgactttggattgcaccgcatcccatgtgccgtcggcgtccggtttcagaatcacctcgttcagatctttcccgaagaagtcggcggtcacgtttttccactcgtcgtcactgcccgccttgcgcctttgcagctgaatgcggatctcggtcacgtcctcgggcggagtgccctgccagaccttctggatctgcatgaagaacggctcgttcttattggtaaagatatagttggggaacgcatccccgtccatggacacaaaagtggtatcctggatataggcagagctgtaattcgtccccgtcacgccctgcacggccttgtccgggtcctctccccccgtcgcctccagcttgaccagtgtcgcgccgttggcgggccgctcccggatgatgtaccgggtgccggcggggatgccctccatcacaaattcaccgctgccggtggtcccgtcggtggtgatctggacgacctgatggatgtagtggtcgccgatgccttccacttccggctgttcggacaggaactgttccagcgcacggccgcccacgttgacatagtagatgtcgaaggtatacacacccaccggataattgccgtccaccttcatggatgcatccagctgtttggtcagggtaaagctgccggtgcgcatcttgttgtggaataccacgtccaggtcaacaggcaggttctcgttgttatcggggtagaggtagctgcggtagacaaagcccacgctctccgagtccgcgggccgctccttgtccgtcacggtgcggccgtcatagggggtgacgccgagccgttcttccagcggatgttcccccagggtaaagccccagtcggggtttgtcacggtggagatgtccggccggttgggcagcagcgagttgaagctcacgggctggccgctttcgcggatgctccagctggtttcaaacaggtcggtgtccacgttttcttgcagcagaagataactgcccacacggaacttgtcggtgaacaccgcggtctggccgtcggccaggctcaggctgccgttttgcaccacgctggccacactttcggtcacgctgccgttttcgtcggcggtctggcgggtgtaccaggcgccgtcggcgggggtataattttgggcttccagcgagccgtagtccgagatctggtcgtcgcccaccgagaaaccggtagacagcacctggttccactccgtgccgaaagccacccggtacagccggtaatgtccggtattgtccgcgccggtgccggtgcctttttgcaggccgatccgcacggcggtcacccgggtacggtcaaagccgggggtggcggcgatcagcgcgttcaggtccacacgcaccagcgaatggacattgggcaaaaacaggtttgcctcgcccagatagcccagtgtgcgggccgaagcagtgacggtcttgccggattcgtcttccagctggatatacagttccgcgccgcggttttcggcggtggcattgtacagctccagttccaggaaggcgtactccgtcaggtcgatctggtcattttggggtgtcagggtaagcagctggtctttggatggctgccggccgctgtcccagccgtcgggctgggtgatatgcagatactttgtcctggtatcggtggtatcggtctccaccgtcacctcgccgcccaccggtgcgccgggcacggcggaatcggccgcctccggctgatagaacagctggctcttggtgtctacataaccggcggaattttccaccgccaggggttccccgctggtggccatggtgctcacatggatctcaaaagagcccaggttgtcgatggcgtcgtcgaacagggggttgacgtcgctttcatccaccactttggtcacccgcagctgattctgctgggggaagttgaaggtcattttcaggttggaggcatacatgccgcgctcaaaatacagcatggtcagggtgtgggtgccgtcggcggtctcggtcagatggaaggtcccgctggcgtccagcacacccgggccgtcggtagagccctgctcgccgtccttatccaggtcccgcagcacctgccaggtctgcgttttgaaattgatggtaccgcgcaccgcatcgtggatgccgcccatatccagcaccagctggccgtcgatgaagatccagcagtcgtcgtcaccctggaattcaaagatgacgtcctgcatgttttcctcttcgccggggtcagccatgttcacctggccgccctccggcacggtgaagctcaggtccacccgctggccgaacatatagttcagcttggtctcctctacgttggcattgtttgcctgcgcatcgttgaagggcagataactctttctgccgttcgccgtgaccggctccacggtgtcatccaggtaatagctgccgtcggggccctgtttcaggcgcatgccgtcctcgctgctgtcaaactgccagtagccgtagtatttgtccgtggggtccgtcacctggcggaaggggaattgcaggtccttgtaggcgttgcccagcgtgatgttcaggctgttgtcgccgcgcaggaaggactcgctgaaatagggcaccgtgatgccctggatggtggcgtcgccgtcgctgttcagccgctgatccagcaagcccgtgctggccccgtcgttcttggtccagtagttggcttcattcttgaaattgtacaggtgatcggcatattgcctgccgtagttgctgtacagattcttcagtttgtcgccccagccgccttccaccatggcattgcctttgccgaagtacagcggccgtgcactgtaggaggaggcatctttttcctcaaagtatttcgataccgccagattcagcagcagcccctgggtcccccaataatccgtgggagcctccgtataggtgttttttgtgctggattccccggactgttcccacatggaatagtagtcgtacagggaggtggtggcgtaatacacgtcgctctgatccacaaatccgtcgccttccgggacatcgatgctgccgtcgcccaggctgtactgctggatcagggacccccaaccgccgttgaggacgctgtggtctttctgttccagagtgacctcatcccatgcaccgccatgggatgtgccgtccagatagcggtagccgaagaagcaggggtaactgtacgccttgctgatctccaaaggcggcgagaaccagaagttgctgccggtgccgttgtccgcaccggggtctttcgcaccgcggaacatgacatgggtataggtatccggcacattttcaaaggcccagacatttttggggatggagtggccgtccacacggtcggccgtatccagggcctccatcgccagccagccgcggccccagccttcgtagtcctccgcctggaccaggcggtctttggcccagtcggcccgggaggtatcttcgccgctcatccaggtataggtgccatccgcatttttcgtgccgaacagcacctgcaccttgccgaaagccgtggcggcgttgttgtagtagacacgggtggtgcccggttctgcggcttccgcctggtaacggccccagacctcgccagtgtcctcccacagatagtccagcatcaggcagtcgaatccgctgcggggcacgtaggtgaacaggaaggtgtgggtcccggcgtgggaactgccctccttgatggtgtaggtaagggtaaacacggtgttttccgacagatcgttctgtcccgtgggcatacggaaatagagcacgccctccgtgttggtggaaatatccagcagaaacccaaggttctggtcgtactggtagttgagataactggtgggcatgccgtcccagcgcaggtaaaggttgcccagttcctgcttttccgtcatgccgtagtcgttggtgttaaaatacagcatctggccatggatgctggcatcggcgttggaagagtgggcgttccagtaggagtcctccacgttggtgttgtaatagtaggtatccatggagccggccacgtagccaaagtggccgggcgttccccagctttcaccgacggagccgctgttctcctgatcccggaaattataatgccggttgaacgggtccctgtgaccgctttgccgggtcaggttgaaggccacttcctcatacaaatagccgctggcattggtatcggagctttgggtgatctcatccgggaaaggcaccacatacacgccgtcccgaacctcatacatggtgcggccgatgtactggttgccgttgacccagttggggctgtccgcgccgtcatggggcagctggatgaaccgggcctccaccgtcacgatggggtcggtctcgtcccctttcagcttgtgcaggttgacaaagtacagctgatccccgggcttcggctcgccgggctgggagcttgccagttccgcggcggcatactcctgatcgctgtcgggcgccgggccccagtagctgggatagtcgccgctgtcgtagtaaaaggcggacaggctgccgggcgtaaagttcacggcttcggccgtatcatccccctgcccgtccagacgccactccccgcccagggactgggcagagtccacctgtccggcgggataaaacgccacccggtcataagccccgtccgggatggcaacggtaaactgtccccgttcccccgcggtcatggggaccaccatggtgtcggtctcccccataaacaccgcgtccacgccgtccacgggatcgctgcgccacagcaggtccacaaaggtcagctgctgcccggcgtaagcataagactccacgccgtcatcgggagcggattccccttccccgtcggatacggaagctgcttcgctgttctccggcagggtttccgtgccggaggacggggcattaaaaacagacgccgggttatcgtcctcagaaaccgtgtctgaaggggtatccatcgcgtctgtatcggggagatcttgtgttgattggtcttgcgctgagatcgggttttctgcgtacatctgcgccgcagaaacggtccccatcggcagagacagtaaaaacaaaagtgcgaaaaaaagagccgcggcttgtttgtaccataacaggggtggcgattttttcataatatgcaaaaatccttccgatgggaatgcaggctgaaacggcaacaaaattcgaccggtttctgcctaaaataaactttatatcgaaaaagcgtactctttattatacagagtatgcaacccaaatcaaggcaaaaagcgcaagactgcaaatgaggtttgcttctttttcaaaaatgggagggctacacaaaatatccttccgcccctcggatgattttggagaacatgatgtcaaaattattattttgttgtacagttatacagcaaaataagccgctattccaataaaaggaacaaaatttgctactacaaaatggcacggtaacgtttccaccgcaattgccgaagcatatgccacaacaattttcatgggcagcaagtcccgggcggatacggtatgccgccgtgccgcagtccttccgggagcagaatccaggccgatcctttgccccgtccgcccaaacgacaaaagtcgccgcgccggactgttccggcgcggcgacttccgcgaaagccttatgattgattaccggaccgttccgccacaaagtccggtcctgttagcgcatcagcgcgtccaggtaggcggcttcccgctgggcaacctgcatctgcagggcgctgatggccgccagataggcgtcgttggccgcctgggcctcggcgggggtcatctgctgatcggccaggggtgcagacgcagccggggcaacgtaccccttgacgccggcgccggtcttgaccgtgctgacgatgtgaccgcaggtgtcacacacatagccctcgctgccggccgtccagttgtggtagccgcaggcggggcaggtggtgtactcctcgccccaggtcccgttggcgatggcttccgcaatgtcgctgtgctcgtactggggagcggactgcgtctggcccgcaggatcgccggaaggcgtctcggggttctccgaaccgtcagccacaacggtcacggtgaccgtcttgtaggtctccgtccaccagcggttgacgatgcggaaggtgtgggtacccggggcgatgccttcatagacaaaggtcatgccgccttcgtcgttggacttgccgctgacgatcttcagcgccgtgccttcctcgccgtagtccaccgggccggcttcgccgtcgtaataccaggtgtaggtctcgcctacctcgatcaccgcatccgaaatgtacacatggtccatgtcaacctgcatgttcatggacgtctcggcagctccggccgccatggccgaaaccgcgatcatgcttcccaatgccagggccgcaagtgtggaaatcagttttttcatatcacatttctccttttgacaaagtccattgtacggaagcccgtgcttcccgaatggcggaaaggctttctgttttttgtataggttcgctttttaccaaagttcacgcggcgttttatattttttattcggcgtctgccaggacctgagacagcggcgcataggtgttggtgtacttccacatatccatgacaggcaggttatcggtggggtagtccgccgtgacgcagatcagttccccctggtcgtcataggtgtattcccggaacccgctctcctcgccgttgtcgatgtcctgctccagaagcagattcccggcctcgtcgtaggtggagaccatccgcagcttttcgccggaataataaaggtactcggtgcaggcctgtccctcgccggtatattcccgcgtgctccacatggggaaaccggtattgacctgatcccgccgggtccagcgaccattctcgtcatattcgtaggtgtacgacagctgccactggctgccgtcggcatactgcgtggtctgcgtcagcacattgccgtaatcatcgttttcgtacacgtcggtgtaatccgtctgccaggcgccgttttccaggcactcatggtccgcccgcacaaggaaatcctgatcgtcataactgtatttcacccgagtgtccgcctcgccgcccatcggaccggacaaagactcggccagcaggccttccgccgtgtagtagttctcggtccaggtgtccggcagaacgacgccttccatgctggccatttcgtccggataacattccacccgggccagcatcacgggttccggctccggcgtgggggtcggctcggccgtgggggctggtgccgcggtgggccggacatcagaaacggcagcggtttccgccggctgttccgggtttgctccccggccggactggttccccgcacaggcggtgagcatgaccgcagccgccgctaccaaagacagatttacaaacagttttttcatgactggctcctcttttcctgcattttgtcgccgggtttttgccctctgcccattcagtaggtaccggcatcggcaaaagttcatgcgggaaaataaatttttttcaaaaaactcatgaactgtctttcccgtccgggactaccgtattgacagatcccctcacgattgacatgaacacgacagaacactacaatcaaaaaagggaaacaatgtcggtttcgccgcttccgcccgggcagcgcagccgcaagggaggaacatcatgttcgatttgcctgacagttattttcagaacacagaagtgaccgaccgcatctctcagctgatgcagtacaccctgctgacggtcctggaactggaattccagccgatctaccggcagaactggtgggagcgcgaactcaagccccacattctccagatggatgccgggtacgacaccttcgccggcacggacaagcagaaacccaccgtcgcaaaatatcgccagctgatgaacaatctgcggcatgcccacaagttggagccggatctggccgatctggacgtgaccgcactgagcaccgtacttctgtatgacgacacatacaaggatctggacatccggcagtacgtccccctgtcccagaaaaaataccggagcgtattaaaagttaaaaattgccggaatggattctcccacggcgatgtggaaagccgtcagcaggcgcgggaccagggtctgcaagagctgcgcatcctgatgcagctgtatgactgctcgaacttcgggccggacctggtccatgaggtattccactatgaccccgcccacccctctgccgggcggcaggcggagcttgcccgccagcaggaattcgggcggttttacaacagttttctggcggcatccacccagctggaacagccgcagacccgccgggccgcactggattccatgcgtcagctggcgcaggccggattccgcacggcaatggggcgggtcatggacgtggtcctgcacgacccccagtatttcagtttgcaggaagccgttcagctgctggccgaccggaacgaccttacccgggatgagctggcccagctgacacttctgcgcggccttctgcagaaggaggaagccgcccgggccggggatgcctcggctgccatggagatggcacagatggcctgcacccagacctcccccatctatacgcccggccgggagttcacctattatctgtgggcctggcaggccgaccaccaaagcggcatgacggaactgcaggccgccgcgcagcgcggcgtgacctccgcctgggacgccctgtgccagacccgtgactctgccgccatggactggctggccgaccggctgcattccggcgctttgccgggcggaaagtcctgggaggaaatctctccctggctgttccgcctttccgatcagggcagccggcgggcgctggctattctggtggagcgcatgggcatgagcaacagctgctgcctcggccccggcgacccggaccggtgccgggtatgccgtcaggcatgcgaagccggatacctcaacgtgctggtgcaccgcctgagatacggcaaggacccctgcaacaattcgcccgaaaaacgcagtgagacactggccctctgccaggatctggcaaagcgggaccccgccgcagggcaggtcgccctggcaagctgcatgatccgggggatcggcactccttacgacccggaacaggccggaaagctgctttccgcctatctggcatccgccgccgaaactccggcggaccggcggggcatttacgccgccgcactgtactggtccggacacctctgcgagtatggctcccatccggacatggcccgggccatggaatattaccggaaggctgccgcctgcggcgattttcccatggcgggcgttcccgtctttatgcaggacgccacgaaccacgatcccaaggtgcgccgtgccgcttatgagactctgaaccgcctggaaaagtatcccacaaactgcgtccgcctggggttccacctggccgcctatggaaacctctcgatcaccgacggttttctgcgccgcaacccttggatcaagaacatggactatgtaaggctggccctgtgggaaaaatggtcctttgattcttttcacgacaaaaacaacagccacaccgtatcgctgttcatcaatctggcgctctgcaaaacgcaggcggatatcctccccgtactgcgcagctggcttcaggatcgcacccctgccgcctcccagctggaagccctgtatctgctgacccagccccagcccgatctgcccggtgcgcgcaaggcctggaataaagcgatctctttccgccaaaagcccctgccggcctccggcgtccgtgaccacggtgttttccgcagccacggccgcaaggaccgcattgcccaggcacttcagaccggcgtcgccccggaacagctgtatgatctgctcaaaagcagcgggttccgcattccccgcttccgcctgggcaacacccccgtcctgatgggcgtgttcttctccgagagtaatcccttctatcgttggctgacggcgctgtatctggaccggtacgaacaggagcggaccgccctggtgaccgcagcccaatccgccaagcaggcgcggatgcgctggttcgagttggagaagttcgtccaaaagtccggccgtcccggtctgcccgaccgcgccagcgccgtgcggctgtatcaggccgaacagggtgacgccgaggccatgcagattttgctggacagccgggcaaacctgaccggcctcgaccgcctgcaccgcaatctggccctggcggacctgatcttccagggccgtgctcccggcgggcacaccggggaggaaggccgtgcgctgctgatggaatgtctggaccacgttcccgacagccatgcccgcgccgccgtactgtgcaccctgggccgctacgagaccgacagccagcagcggacagagtggttccagcgcgcccagaatatcgaccccgagggcgttttgccctgcgccgccctgatcgacgagtacctgaacggcaaggactaccaaaaagccgtccagcaggccgaccgcttctggttcaagctgaatttgcagccttacaaaggccgcagcctgtccaccgcctggccttccacccgggcgctgctgaatcagtcgtcggtgaacgcctgggccgttgccatggggcagaaggcctatctggcgctgctgaacaacgacaaatcgctgacaagcgacaaccgcacggcgctgaagcatctgtcacagatggacccctccgtgggcgactggcgcatttacaaggagccttctcccttcgattccctgtcgtccgggctccgtctgatcgtcagcctttccatcgttctccttgtgatcttcgttgttctcggcatcggagagatcgttttggagctttcctcgtcccttttcaaggtcatttcctcgaccgccgatgattttctgtcccttttgcttgtggcggcagtcatctggtacatctatcgccattggaaaaaatgaccccggccttcctccggaagggctgacttttccatgctccggtcgattgacaatgtccggagcgcgcgctacaatatacgtggctcctatacgcagtgtatggtgttggactcgggggcagcacgccgtagggggtgttgctttcgctgttccttggtgccctcttctgcgcacgggccactttttattgcctttttgcttcaggttatgggatttttcccataacctgaattttttttgcccgccgcatgaactttcggcctccggcgtccctattgggaaagtataagaaaaaacttcaaggaggaacctgacatgtgggacgacaccaactatgacgacacctttgcagccgaacccgactggccggaggagaccgacggtttcgaagatcctttgtaccgggaggaacagcagtcgccttcccgcagccggcaggaggaccgatacgcccgtgagcgggaggaatggactcgctttgtgctggagatcaacaatgtgattcccgggccgctgaacgacccccgcctgttcgaggacaacgacagcatgtggtaagggtttcggggattttcggcaagaatttccataagcgggaatttcctgacaaaaatagcaagctgtgatacaatacatgaggatcacatcagaaagaaggagtggataccagccatggcggaatccaatgcagttgacattttacagaccgactttctaacgccgttccgggaccttgcccggcaggcgatcggggagatcatcgactccgtccccgaattgcgcaccaacgaccagtggtggaaggatatcgaggaatataatctgaccaatccttacggcaacatcatcgacaccgcgggccggacgcccaacgtaaacaactttgaccacaacggcgcggccaagtggctgatgcggatgtacgtccagcccgataccgtcctgctgaacccgtacctgctgaattatcagagtgccgttcaggtggtcggctgcgccccgcaggaatacagccgcgccctggcggcctacatggatctgcgcaacaactttttgggccatggcggcgccgatgccgagaccatgactttttacgatcttttgtgccacgccagcctggtgatctggatgaccgcacacctgaactgctcggcccagcaggcgacgctgcaggccatgcgggcttcccgcgacaacattgcagcccagtgcggcatgcagaacccggcagaatacgccaccgccgaagcggagcgccagctgatgtacaacacgctggactgggcccgccagcgccaggaagcacgggccgccgcccgcgccccgcgccgggaccgcaatgcgctgccctttgagcagtggccggtggcggagccgatactcatcgccccctgggagccggtgttcccggagcagaccattttccccagtgagctgagaaaaggccgtgagctgccccgcagctacacgccctatatgccctgcccgcccaacgttgctcccggtcccgaagtggaaaaggaggagcccaatctcgtccggctcaaaaagaagcacgcacaggccaaaaacaccccagatgtccaggtctcggacgatgacatcctgtacaagatcctgcataaagtggtctttgccatttcctggttgtacactttcttgtattacctgttcactttctggatccctcggagcagaaccaaaaagtgggtctgggatgatgcacattcctatgcctaccggcagatcctgcagggcgcagtgtatgatatgcgcgccggtaccgacaaaccctataccgccctcaccctgatcatttatattgtggcgctcgttctctcctctaattcctttttcttgttcaacggattgggtcagattttgttttatctcgatggctttattggttggtggctccttttcctcacctacaaaagcgggaaggccggctataaaatgtatgtggaatccaatgtgctggagcccggcgtggccccccaagtctttatatactatcacacggtagccaaaccgattgaaaaggtattctatgtattcgcatggatgctggcaatcggtgttgccagcgccttcccgttcttcgcccgtccggggcttgcctttgccatgggtgtcctgatcaccctgtttggcaaagacgtggaatatcctaacggctaatcacagccccatgataaaaaaagaaggagaacatcatgttagacagtgaaaaaaagcagcttgtaacattcttcttcagctttctgtattccgatgaaaacatgcaggcgctggaagaacttaccgcctcgctgaaaaacgcaatgctccactatacggtggattccgagacgcccaacggcgttcctctgtacgatattttctgcgacgagtacaaccagctgatgctgaccatcgtcaattcgctggagccggaaaaccccactccctgccagacggatatggacatgctgatccgcttggcggaatacggtgcgcgccggggaaaccccctcagctattttgcaatgagcgtctgctatctgtacgggttcggtgtggcacagtcgctgcatcagtcactttacttcatgcagttgtatgccgccatcaaccgcttctatctcgcccttacccagtccatagacaaaggccccgaatccgttgcggatgatctactggcctatatggacccggatcacttatatgaccagaatcccgccgcgcgccgcatgacgcggcagaatgtgatcaacttcctccggccgttgaccagggatgatttcacctttgcccaggacaacctgttcaatgctctgtaccttgcaagccacgtacagatgtacatcaccaagcagccctacaccccaaacctgctgacccttgataccgcgacggggacctcggcggccgattacatcgccatgcccaccgaatacaccgccatgctcagccagatgctgtccaaccagaaaagccgcaacacgcccaatgccaacaatgtggagctgcatctgcagaccatccgctcgctgctgaagaaccccttccccgccgaatgccggcagcagggccacgccgaactgatggcggccgaacgcggcaacggccgctacgccatggatcactggaacaccgctgtctccctgtatctcagcgccgccatgcagggcgacgccgaagcggcggcaggcgtgggatactgctgtgagcacgtgcccgaaggcttcaactttgcctaccgccagctggccatgcagtggttccagcacgcggccaaggccggcagcgcctgggccatgcagcgggtcggcgagtactacgaaatgggtctgtgcggtcccgtggatcacgagatggcccagcagtgctatgaccttgcccgcaagatgggcatgcccgcccgggcctgatctccccagccctcagccagcaaaaaacgcccccatccccggcccgccgaaaggcggctccccggagatgggggcattttattgcatcgggaagttcaggccttcccggcgttctgcagtctgcttcgcagcgtggcgcggagcgtttcaaagcggcggcgtgccatggacaccgccgacgcatacacctgcttataggcaacgatggagctgtcccgcaggggcaggcgcagttttcccagaatgatgccccgcatggtgtccggcgcgggctggggttcgtagacaaaccccagatagggacgttcaaaaatgccgtcgaacagttcctgctcatgctgcaccagtgcgcgggcgtagcccacgtcgtccaccacctcgtcctccttgagggggcgcaggacatcgttggtcatgaacaggcgggtgtattccttctgatcggtctcgcacagcagttccagcgcctgggccagctgctgcacagactccaccgccgtcacaaaatccgtggagtccgggtcctcaaaaggcagttcctggggttcgccgtcctcttcctccttgggcgcgatggtattcgccatccgcacgatccgcagcagctcccgcagggagctttcggtcacgctcagttcttcggccagcggcgcgcacagggccgtaggcagatcctccgcccggtagcgggaatgcttgcgctccagcagcgcattgagtttgcgcagcagggccatatcccgttttttcagtgggccaaaggctttctgctcctgcaccgaagtgacggttcccgccgcatgaacaagtttctgccggtacagcacaaaaaagtatccgatgaacggcgtttttgccgccgggtcataccggcgtagagcctcgttgaccgcttccatgaaagccactccgtcaaactgtttgctgcgggccatggggtcatactgggcccgccgcaggctttcctcgttttgcagcagagcgctttcctccgtttgcagggcctcctccagcgtgcggtcaaatttcagatagcgcagcagcagttcaatgaactccatccgctgccgggcctgaccggagcgctcctccgggggcagctccaggatcgggtggctgttgatctgttcgcgcagtgccgtgcgttccaacatctgtgtctgcatggcgtgcctccgttacagttccagcatctcacggatcatgcggtccttggagtcgcagtccatgcccgccaccagatccaccagcgagttcagggtgaacagcgccgtcacatcatacaggcgggacgtccgggtctgcccctgctggcgcagcacttcccggtaatagatgccgcagatctgggtgttgcggcggatcttttccgcgtaggacaaggcgctgaacagcaccaccggatagcttttggtgccaaaggtcatgcaggcatagtagcaggtgtcatcctgcatacagccgatcatctcggcaaacaggcccagcagaaggtccttgttctggctttccggcacggtcagatcccgcagcgtccagttggagcgccccagcgattccagttcccggcgcaaaatatccatgttccggttccggctgtcgtttttctgccggaccaccaccacggtggccgtgtcccccggttgcagcgttgcgtcgatcaccggcacaatggggaacgcggtttccgtcagtttggtatccagcttgaagttgacaggattgagcggcatcgtctccaacacaaaattgctttccagcgggactgccgtaaaatagatccggttcatccggccatgcctcctttttcttcaacggccttttcgttgaaaatgccatcatggcatcgaaacctgcagaattgcatcgttatttgtattgacgaaagtataccacaaaatcgcatccgctcacaagattggcgcacacgcaaaaagctgccgtgtacagtcccgaaggacgacacggcagcggaaaagcaccatccggaaaaggttccgcacaaaggtcacagcccggcgcatccgcccggccgcggcggataaagacagcccgtccggtcgcttggcacccggacgggctgtctgtggagagtttttcagtgaccggccgggcttacggcagaatgcctgcgcccgcatcaaaccggctgcagcaggggaaaccgtggttcagggcaaagtcccggggatcggcaaaatcgctgcgccagaagcgctgcccgcagccattgcagatgatgtacacctgaccggcttcctcatcatagtaagccatggcataaccggcgtattcgtgaatgacgttgcagcttccgtccggattcagctggctgccgcaaaccgggcagatcccctcctgcggagctgcagcctcttcggcggcctgttgctgggcggcgctttccgcggcggcctgagcctgtgcctgggcttccgccgcagcggcagcctgggccgcagcctgttcatccgccgccttctgcgggcaggcgccggcggtgtgtccggtctgtccgcagtagctgcagctgacctggcggacggtgacctcctgcgtgacagtggtatatccctcccccgacgccgtgatggtcacgctgcccgggcgcagggcatcgacccagccgttcgtcacaatggcaacggactcatcgctgctctgccaggtgagcgacgttgtatccacgtccacgccgtccgccgtgagaggacaaagctggatgcctttccccgccgtgacctcgctgctgcccttgagtaccagttctttcggggccggggtcggcgcaggagtggccaccgccgccgtttcctccgccgatgccgtcgccggtcggctctccggctctgcggcactttcggcggtctgcaccgctggctggctgaccgggtccggggtttctgacgtttggctgcacgccgccagcatggtgactgccgtcacggcggagagcaacagtacgaatgcgcgttttgatccttggttgtctttcatggtttcctcctgctgtaagtaagttttgcccgtcccgggcttacaccgttacagtaggtacgcatttccacgaaagttcacgtcgcgggaaaaattatttttgctttctttcctccaccatcttcacgaaccattccaccatggccgggtcgctgtgggagaagaaagaactctgttttttgtccagcccggagatccgctccatatccgccgggtccagagcgaagtcaaagacgttcaggttttccgccatccgctctttgtgcgtggatttgggaatgacgaccacgccccgctgaatatgccagcgcagaatgacctgtgccgttgttttttggtacttcgccgcaatttcggcaagcacgggatgttcaaacagacctccgcggccttccccaaagggcgcccaggcttccatttggacatcatatttgtccatccactgttttgcttccccctgctggtggaagggatggttctccacctggttgaccatgggctttacccggctgaacgacgcaatatccaccagcctgtccggataaaaattggaaacaccgatggcccgcagcttgccttcgtcgtagagatcttccagcgcccgataggccccgtagtaatccgaaaacggctgatgcagcaggaccaggtcgagatagtcggtgcggagcttgtccatggattccagaacggaacgccgggcttcctcatacccgtagtgctccacccagaccttggtggtcagaaaaacctcttttctgggaatgcccgatctgacaagggcgtttcccacctgttcctcgttgaaatagctttgggccgtgtcgatcaggcggtatcccacatcaagggcatccagaacgcagcgttcacattcctctttcgatacctgatagacgccgtatcccacaatcggcatttttaccccattgtataacgtgatctgttccatattgactgcctcccgttctgtttgtttcacaaaagaattgttgtccggcatgttttgtgctaccatacagagtgtaacacccggttgttactaccggtcaatagcctttttgaaaaaattctgggatttcgaggtgttttccatgcaatacagtatgaaacaggcttgtcagcaagtcggcatgacctatgaggccttaaaattttattgcaaccaggggctggtccccaacgtaaagcgggacaaaaacaattaccgggtatttgatgagcgggatattgcatggatccatggtctgacctgcctgaagcgctgcggcatgagcctggaggacatgaagcgctatcttgccctgtgcctgaaagggaagtccagcattcccgagcggaaaaagatcctggaaaagcagcgggaactgctgacggaaaagctgcgggagttgcaggaggacattgcctacatcgaccaaaagcaacgctattatgacgatgtcctgtcgggaaagacccggtacaccagcaacctgatcgatacggatgagggataagcccccgattctgtccctgccatcgtcccctgatttttgcaccccataacccaaaccgcccccgggcagcattgcccgggggcggtttgtttgtatcgggtgttccggctcattcgggcggccggcagcagcttcctccgcagcagcaggagccgaagctgaaggacagcagaaaaccgatcaatcccatatacgccatggagttcagcgggttggaggtgatggcgcaggacccggtggaacaccccaccagggcgtaataggccagaccggccagcgcgccgcccgccgtaaacaggatgggccgcagccattttttcaggtactttttcataggggtcattcgcctcccgacagatcgtattttgtcttgtggtccgcagcagcggtgtccgcctcccggtccgggctgtgctccggcgggtgcatccggcgttccgggagcacccgggcagaaatcggcattgtcgttttgctcctgcgtatcttgtttgtgtccagtatataaaaaagtattttccccttccgtgacaaggtcccccagagccgcggctgccccggagcgggacgcactttctttttgcccgttgtgcagacaaccgttttttcccggggaaaagcctatactaacatcaccgggaacgaaagaacgctcccgaagagaaagagaggacctgcaccatggatttggaaaacagtgcattcttgaagctgcgccccgtacaggacgccaaactggcccacaccgttgaaccgctgcttctgccgcaggaaaagatcctgcatcagtaccagggcgtccgggacggcgtggtatttaccgaccggcgcatcatcgccgtgaacatccagggcgtgaccggcaagaaaaagatgttcgccgttctgccttacagccgcatccaggcctatgccgtggaatcggcgggggtgctggacttcgacagcgaaatgaagctctggctttccgggctgggatgcgtcacgctggaacttttgtccggagccgatctgttcgccctcagcacgctgatcgatcaggtcattttacactaaccgccggaaacggcagaaaaggagattctcatggtcatgtatttctgggagcgcagtgcctcggtctggatcgcgctgctgtacgttcttatgggcgggctgctgctggcattccccgccgccaccagcacggtgttcgtctgggccctggccggaggggccgccttctacggcatcagccacctgctgcgctatctgcagacacgcaaaaaagggacctcctccccggcggatctcttcctgaccgttctgcccctggccttcaccgtctttgctctggtctggccccagacgctgctgtccttcctgccgctggtgctgggttccctgctcctgctggacggcgtcggcaaactgcccctggccatcatggcactgcgggccggcacccccgacaccgccgcgctgatgctttccagccttatccccctggtcctgggcgccatcatcgtggtcaaccccttccagacggtacagctggtcgtccgcatcttcggtctgggactcatcgccgacggcgcagcggatttcgccgccgtctttaccgcacacaaggccagccagagctgaccctgccccgccaaaccaccaccgctcgcatcttttttccaccacaaaccgttacgttggacagacaaccgcttttggaccccattccgcgtatactgtgataacagggcagggaaagaccccagcccaaagaaaggaaacactccatgaacaacactacaaccaatcccaagactctcgccgccaacgaagccattctggcagcactccgcaaggcacacagcatcgcctcccccgcctccaccgatccggaagacctgaagcgccagagactgggccaggaggccctgggccgcctgctcacaccacccatcgggttcagctgggagccctttgagatcgacggcatccccgcagcctgggtccggccggaaggcggccacgaccgcagcaagatcatcctgtactgccatggcggcggctacaccagcggtaccctggggtacgcgcggctgatagcatcccggatggcattggccaccggatatgaagttctggcgttccagtatcgcctggcgcccgagcacccgtatcccgaagcgctggaagacgcacgcctggtctgggagtacctgatgtacctgggctggggtgccagagatatcattctggccggcgattccgccggtgggaacctggcgctggaactggccctggacctccgggattcgcagcggatgctgccctggcggatggtgctgctttccccctggaccgacatgaccgccagcggcgacagctacgaggaatgccgcgacctggaccccctgctgacccgcgcctacatagaagccgtgcgggaagcctacgcccccggcgaagactggagcctgcccgaattctcccccctgtttgccgatttgcaggggctgccgcccacactgatccaggtgggcggacgggagatcctgagggatgactccacccggctgcaccagaaactgctggaagccggtgtccccgccatgctgcaaagctggcccgacatgtggcacgtattccagatgttccccatgaaatccgccagcgaagccatggaacagatggcgcagtttctggaaacgctgcgctgaaagcgcgagcgacataagaaaacgaaggttctgcaagaactgcaaagcatcgcaaaaccgctgcaaggcggcagatgcaaggcagaggggcaaagcgctcctatgtggaacgcaagacccgataacgcggcagatgccgccttgcagtcagagttttgcggcttcgttttcttatggaaccgcgcaggaacccccggtgtttttcacctggcgggcataacgccccgccgagcgaggaacaccggttttatgagacacaacaaaacagaacaaacagaacgcctgctgttatcggcacacccggtgttggaatggttcttacaagcaagacaggacagggtgtaaaaaatgacagtatgggtagtggcggcggtcatcgccgtaatggtctggagcctgcgcagcagcgcacgggccgcgctggccggcatcggctggtatgaactgttcttcctctttctcagcagtgcctttctgggcgattgctttgagaccatatacgttttcctcggcaccggcgtcctgatgagccgcagcagtctgctgtacgccccgctcagcctggtctggggtgcgggggccgtgctgatgacgctggtgctgatgcccctggcccgcaagggcaacgccgcccttttcgccggaggtgtggtcctgggcggcgggtttgaatacctggccagctgggtgctggaactggccaccggccggctgttctgggactactcccggatgccgttcaatctggacggccgcaccaacctgctgtacgccctgttctggggcgcagccggggtgttctgggtccgtgtggcggccccctggctgctgagcctgctgcggcaggtcccccgccgggccggaaaggtcacggcgctggtcctggccctgctgctcacggtggacatctccctgtcggccgcggcgctgttccgaatggaggagcgcagccgggggctcaccccctccaacacggtggagcagacactggatgtgctgtacaccgacgcccggttggaacagcgctaccagaacatgcagctgccgggagagatcctgaccttttgaccgcagcccgccccgcgggcaacttttccacaaatccaccaatccactgatctgaccggccttccgccgggagggaggaaccatgaaatacactgcaattatgtccctggaacaggccgtccaggccgcccgcaagcgggtactgagcggaggcgtggccgccgggcttctggtgaccgggctgggcgtcgccgccctgttcgcccctctgctgctggggtggtccctggcagtcatcctgatgatcgggtttgctctgtacggcgtagcccagctggccgcctttctggaaacggccaaaggccagcgcagcccctggacgctcatcggcgggctgaccctcatcgccttcgcggccgtcgccctgtgggccgccttctttactcccggcggggccgccctgctgatcgcatccctgaccaacttcgtagcctttttcaccgtgatccagggcgtcagccagctcatcctcttcgatgagatgcgccgcagccgccttcccggggccggctggatgctggcgggaggtatcctcaacgcggtggccggcaacctgctggtcatgcagcccctgaccggctggctggccgtcagcaccatctggggcatctacctcatcggcaccgggctggcgctggcagcggattccctttccaaccaccggggccgctatatcgacgcctgacctatcacaaaaaaagagccttccgccagagcggaaggctctttttgctgtcattcgtcgttggggtcgggttcttcctcggtgatgggcatctgcaccagcagttcaaacttgctgcggtcaaagcgcagcagcccttcgtcccgcatcttgcacagctcattggaaagggcgctgcggtccacgaacagaaagtccgccaggtcctgccggttcagggggatcacaaacgtccggctgcccgccttgtggtactggtcggacagataatcctgcagccgctcccgcatgctgcggcgggtgctgtcctccagcttgcgggtcaggtactggcctttctgggccaccgccagggtcaggttctgcaaaaagcggatctgggtaggtgcagtcaggacattcttgcgcagcagctgctccacgctcagatacaggatctcggtggggtccccggtggagatggaaaggtgcagcttataccgccccaccgcgttcagctcccccaccgtgtccccttccttgagcacatacagcaggttgttgttgccgttgctgtccacatgggccaggcgcagattgcccgacaggataatgccgatgtccgggaacaggtccccgtcctgggccaccaccgtccggcggggatactttgcccggtggggcgacatggccgctatggtctgcaaaatttcctcgtcggtcatattgcgaaaaagcatcccttttttcagcggggccagatccagttccctttccatgccgtctgccgcatcctttccgttcagagtatctttattataatccgctgcaaatgggaccgcaacacagtttgcgcgacttaggccccctctccccgccgggcgggccgtccactttactgaaaattaactttcattttactgcattgtggtggagaaactttcacgtccgacctacaatgaaactgttcccggcaagcgggaacacaaaacggagcaaacaagattggggaggcaatccactatgaatccgacgcaaagcaaaatgaatcagtcccagaagctgatggtctttgtgctgaccatgtcgctgtacggtctggcgaccctgtttaccgagctcatcccgaaattccaggtaggcatcgtggaattctcggtggagtatttcctgttcattccgctggtcctgtccatgctgttcgacccgctgtccgcggcgctgggcgctgccaccggcgagctggtgttcagcgagatcatgctgggccagttcggcggcctgggcgagctggaaaagttcatcaccgtcaccatcggcgtttacctggcgggccgtctggtgcgcgatccccgcaacacccgcatggtgggcattgcggccatcctgggcaccggcgcccagctgctcatgggcaccatcgtggacatctgcaaggtgcagtttgcggtggaggactttgaagccgtggccggcctgccggagagcgtctttgccaccgagggctttgccttcctcaatgacctgctgttctcgggcatcctgttctgcctgctgcccacgctgtacctggtccccaagctctacggcaagatcgagccgttgctgggcatgagcccccgcaccccggagaccgctgctcccgccctgagcgtcaaaacgctggcaggctgcgctgtggcctttgtctgcgccgtggcggcggaaatgctggccaccagcggtctggaactgatcgactgggaagcatcctgggcggagagcggcaccgcctttgcggtgggcatgatcgtggccgccctgctggccctggccgtgctggtgctcatgaagaaaaaagctgaggcgaaataaacgactatggccatcatcgagatcagggacctttgttatacctatcccggtgcggcacagcctacattgaatcatctggaccttacggtcgaacaaggggatttcctcgccatcgttggcaacaacgggtgtgggaaatccactttgtgcaaggtgctcaacgggctgatcccgcacttcatcacgggaactttcaccggctcggtcaaagtcgccgggcaggataccctgcaaagcgacgtgggcgcccttgcccgcaaggtggggtatgtgtatcaggattttgaaaaccagatcgtccgccccaccgtgctggacgacgcttcctacgcctgcctgaactacggcatggaggactacctggcccagggccggcaggctctggcccggtgcgggctgcagggccgggaggaagaatacgtctggcagctttccggcgggcagacccatctgctggccttggcaggtgcggtggccctggggccggacattctgatcctggacgaacccatcgcccagctggaccccggccacgccgaccgcatctacggcgtgctgcgggagctgaacgagaaatggggcaagaccattctggtcattgagcaccacaccgagtacatcgccgactactgcaagcacgtcctgctgctgaaagaggggcaggtgcgctggatgctgcccacccgccaggccctggcccgggtggaggaactgcagcagagcaacatcttcccgccccaggtgacccaggcgggctatgccttgcagcagaaaggcctgctgcccccggagcaggaactgcccaccacggtggaggagggcaaggcagcctttgcctccctgccccgccgggccgtccatcgggagctcccccatccggcggagcagggccccgagtctgccgccctgcacggggtgacggtctcctaccgcagcgtcaagggcgcgccccgggtggtctttgaagggttggatctgaccctttacaagggggagaagatcgccctcatcgggtccaacggcgcgggcaagtccaccctgatgaaactgctggtggggctgctcaagcccaacgaaggctccgtctttctggacggcaccccgctgcgggacaccaagccggaacagctttcccgccgcatctccctggtctaccagaaccccgaggaaatgttcatcaaggacagcatcgaggcagacatcgcctacgccatgcaggtgcgcggggtggaaaactggcccgaaaagaccagggctctgctggaacggttccggctcaccgagctggcccaccgggacggacggctgctgtccggcgggcagatgcgccgggccagcctggccatcggcgtggccctgaacccgggcatcctgctgctggacgagcccaccgccaatctggacatcgccacccggcgggagatcctgcgcaccctcaacgatatgaaggagatcaccgacacggtgctcatcgccacccacgacatgcagctggtctgcgaatgggcccagcgcatcattgtgctctgcggcggcaaggtggtggcggacggcactcgggacgagatcttcggcaacaccgccctggcggcacaggtgggcatccgcccgccggagatctttgccatgggccgcgctttggacgacacttctctgtgctacacggtgccggaattcctgcggcagtttgaaggagagaatgcggtatgatgcaaaaactgtctgaaaacatcctggacaaattttccatggatttcctgcgcaatcaggtgctgaaaaacgcctacggcaacaacgataccgtcattgccgcccgggacccccgggtgcttctggtatggtatctgttcttcgggctggtgccctggttcgtgcaggacaccgcctttctgctgggctgctttgtgctggtcatgatcaccaccctgctggcccgggtggcagggctggtgctgctgctgttcggggtgggggtcttttcccagaccggatacctgctgctggtcacctggctgttcggcggcgacgcctccgccattgccccgctgctggtgctgaccctcaaggtcgccaccatctccctggcatcggtgacggtgttctccggcctggaccccgaccgtctggccaacggcctgatgtggttcggctgcccggaacggctgtccttctccatctcctacgcctaccgcattctgcccatgctcatggaggagttccagaacgtgctgctcagctaccggctgcggggcaatccccccgcccacgacacctttgcgggcaaggtccgttacctgatctatcaggtcaaaatcatcatgtacgccttctatccgctgatgctcaacactgccaagcgcagccgcactacggtggaggcgctggagatccgcggctatcgctatgccgcgcaggacaaggcggtgcgccgcatcaagctggcggggctgcatctcacctgggacgacggtatttttgccgcggtctcggtgctgtgggtggccgtcacggtgctgctttccacccttgtgtaacaggaggaaggaacctatgtatctggattttcacacccacggcaagctggccaaaaagctgccgttttcccaggaatacacccactggctgtttggggaggcccgctccgccgggctggacgccctctgcctgaccgagcatttcaacacctggggctttgccgagctgtacggctatatcgcctcccatgccgaccgggatggcgacaccctggtctttgacgggctgcgcatcttccccggcatggagaccgacatcgccgagggcgggcatatcctgtcggttggccccatggaggccatcctggaactgaaccgccgtctggagccctacaaggcgaagggcagctttctcccctttgcggagctgatggacctgttcgaccagtaccccgtctttgtgggcggcgcccatcccttccgggagggcggtcacatccccgagctgcccgccgaccagctcatccggctggattttctggacatgaacggcaaggacctggccgaggaccgggagcgcacccgccgtctcaccaccgggctgggcaaggctctggggctgccggtggtcagcggcagcgacacccatcaggccgtgcagtacggctgcgtacgcacccgctttgccgagaccttcaacacggtggaggccctgcgcggggcggtcaatgcaggcggatacgagatctgcatcgcggaggacgcctcccgccaggtggccaccgcggcccttttgaagcgggccctcaaggagatccacgccctgggcggcgactatgtgtcggtgctgctgggccgggaaccggcctggactgccattaccgccgccgctgtggtataatagggagaaatgtttgtcccggggagtgtatctatgccgctgcaatttccgcaaagtcccgaaaaactgacccccaccgagcgccgcctgctggaatttatcgagagccaccgggaggaattcctcttcatgaccatcggtcagctgtcggcggatctgggcgtgtcggaggccaccatctcccggtttgcccggcacctgggctgtcaggatttcaagcagctgaaaaacctggtgctggcccagaaccatctggaaggccccgcgggcaagctggcccgcaccgtgctggcggatggggaatttgacccccgccgctacctgatgcagcagcagacctgcctgcaaaagaccatggaagccctggaccccgccgcctttgaggaggcgctggaagcgctgctctgcgcccggcggatcttcatccaggccaaaagtgcctcggcggccatgggacagctgctgtttttccggctgcggcgtctgggcctgccggtggaactgctgcccggcagcggcaccgaactgctggaaggtctggtccaggccggggaacgggatctggtgatctttttcggcttttccaaggtctcggcggaagggcggatgatcctgcgccgggccgggaccgcccgctaccgcaccctctgctttaccgggcggctgcatccccccgcggaggagcgtgccgacctgaacctgtacgtctaccgcggcaccgagaaggagtaccactccatgaccgcggccgccgctctggtagacactctggtggtggccgcctcccagcggctgggcgccgacggcgccgcccgcctgaaagaactgcaccgcatgaagcagcagttcggcggctgatacaaacacaaacgcgcaccgcaaactttctgcggtgcgcgtttttctgtttcgcgggcagggcggcccgatttatgccttgttcagcagttttttgtaggtcatgtccatgcccagtgcccccaggggcgcggtgatcaggatggccagcaccgccaccgacagcaccagctgtccgcagggcaggcccagagccagcggcaccgagccgatggccgcctgcacggtggccttgggcagataggcaatgacgcagaacagccgttctttccaggtgagggaagtgcccagcaggcacaggcagacgccgatgccccggaacaccagcgccagcaggatcatgcccaccgccgccaggcctgcgcccagggtatagcggatgtccaccgccgcgcccaccagcacgaagagcatgacttccgccgccagccagagcttgccgaacttttccgacaggcgcttggagacaaaggcggtgcttttcagtttcagggcacaggccatgctgaccaccgccagcaggccggagaccgagacgacgccctccagccaggtctccaccgccatgagcagaaaggccacgcccatcaccacaagaactttcatgctgttgcgcacatagtgccggtgggcgtaggcagtctcaaaaaaggtgctgagcagcagccccgccgccgcgcccagggcaatgcccagcacgatggacacggggatggaggcaaagtcctgccagtgggcgctgccgccctgggccatgcccacaaaggtggaaaacagcacgatcacaaagatatcgtcgcaggacgcccctgccatgatgagctgggggatgctcttgtcggtgccgtagccggattccatcagctggaccatgcggggcaccaccacggcgggagacacggcggccagcaccgcccccatgacggcggcctccagccggtcaacgcccagcagggtgggggcaagcaggacataggccaggatctcacacccggccggcacgcaggacatcatgacggcggggcggcccacctttttcaggtccgccaggttcagggacagccccgctttgagcaggatgatgagcagggcgatctggcgcagatcggcggagatggacaggatcgacccgtccagcaggtccagcacatagggacccagcaggataccggtaaacagcatcccgatgatgcggggcaggcggacgaactggcacagcgcggccagagccaggcccaccagaatgatcagggcaagagacggcagcataacaaaaaatcctccttttgcgcggttccgtcggaaaacaaaggcgcaaaacctttgttttccgatgtcccacacgcttttttgcacgcaaaaaagctgatgcctttctgcggacgatacgttcacagaagtcatcagcttgaatcagcggtttaggtttcccatgggagaacttcattcccggcggttattgtatcatggcgccggggcgctgtcaaccggcaggcggggcggccggttacacttccctgccgttttttgccttgcagatcagctgggtcatggtgcccatggggcagtacacgcaccagctgcggggtttgaacaacaccatggtcaccagccccagcacggtggaggtgagcatgacgctgtaaaatccaaaggcgaactgtgccacaccggggtggaacagggtgccgtggtaggcccagtgccagggcagcttgaaggtccacagcagggtgaccacctgcttcaggtcctgcgcccccgcaaacaccaggtaggtgttccacagcatgaggaagaacatggcaaagaaaaataccagaaatccgtaccggaacgccttgcttttcatccagcggggcatatcctttttccgggacaggccgaaccgcccgcccagcaggccgaacagctggccccggccgcagtagcggttgcagtagcccttggtgccgcccaccccggcgatgagcagcgggataaagaagcacagcagccccagccaggcaaacaggatattgaaaaagcccagaatgagatacaggagggaaacgatccaaagatagtcgtaccagtgctttttcacgcttccacctccccgacggtgatgacgctggcggggcattccgcggcgcatttgccgcagcccacgcacttgtcggggtcgacccgggccgcaatgccccggacgatctcaatggctttcatgggacagaccttgacgcagcagccgcaggccacgcaggccgacgtgtccacccgggctttgcgccgctttttcacggatttcatagcatacctcccgaacttcagtgggaccagtataccgtgaaccggcctgcctttctgtgatgaggtcacagacgggcaggggcggcgcgccaccgggcatcacagcgcccggtaacaggcgcagacggcctcggcggcctgctccagggtgatacgcccggtgtccagatacaggtcacacccggcttcctccccccagatgcggttggtgtagctttcgtagtatcgtttgcgctgccggtccatcttgtgcaccaggcgggtggctttttcccggctcaggtgttcctgttccatcttccggcggatgcgctgctcctccggcgcatggacaaagacccgcagcatccgcacatcctcgtctttcagcacaaagtcggcgcagcggcccacaaagatgcagtcctcccgcccggcaatgcgccggatctcgtggctttgcagctcaaacagcacctcggaggtgggcagaccccgggtcacatgatagttgccctcgtgcacggtgcggaacagccagggattggtggctgcctcgtcggcagactgaaaggtcttttccgatacttcgccgtacttgcaggcaagggtaaaaatgtccttttcgtacacccggatgcccaggctgccgccggcgcgcagggcgatctcatgcccgccgctgccgaattcccgtcccaggcagatgaccttatggctcattgtccgttttcctcttttcctgtcagttgttcctgcaccgccgcaggcacttcaaacccgctgccggtggtgtagctcagttttgccgacaccgtcaccggaaggacctgttccagcccctccaggccgccggtgcaggcgcagcggatggaggcaatggaaccgtccttcaccaaaatctgcacactgccttcggtcagggtgaccggctgggattccatatccggtgcggcagccaaagccacctgtttcatggcctcctggtccagcgtcagggtatacagccagctgccgttgccggtgtccacacagtcaaaggaaccgttcaggcagatctgatacagcacctgcagcagatcgatgcgctgggccagggcgctctccgcctcggtcagcaccgcgccgccggggccgcagaactgcccgttggcaaagtagacggccagatcgccgctgcgcacacagccgatcttctggtcctccacaaaggtctgctcgtatttcagcgtctcgtccaggttcaagggaccgcagtccacccccagcaccaggtccgccgtgtaggattcctcctgattcaggtcggtccaggcgcacagcagacggaacagatcctcggggatgacctcctgagtctccggcagaccggcgctcagggcctgatccaccgcctggggcaggacgtaatcctccgccacgtcggcgggctgcagctcggcggtgatggagtagggcgtcttgtgctcatccaccagcgtgccttccgaggtaaagcgcagcgactgcatctgcccgccggaagcggtcagttccagggtcagtttgtgggtatcggtcaggtaatcgctctggccggggagaagcatggccagaatggtcctggcgttctctccctccgccgtcagggtgtagcataccgtcttgccgtcccggctggtggtgaagtccaccgtctgatacagccgggccgcctcctggggcagtttggagtaatcggggtgcaggtcgctgagctggtaggccttgccgttttccatcaggatgacgccgtcggtgtagtacagcgacatgccgtccttgtacacgcaggtcacgtcccggccctgctcctgggtcttggtgacggtaaagtcggcgtggagcagctggccgtccagctgggtatcggtgctcatggtcatggcgtaccgggactgggcggagaagttctccagaatggtatacgcgtccgccatgctgcgcaggggcgcggtcaacaccagcaccagggccgccagcaggaccaccgccagggcaatgacgccgtaccgctgctttttgctgagtttgcggaacttgccggtcttgccgggctttgcggacggttcggtccggtcggtttccccggtcggctgcgtgccgtccgccggggccgcgctgctccgggcattgtccgtgtgaatcctgcggccggatgcgggctgtgctccgcccggcaccggcttccggggcggctttgccccccgcacccggcgaaggatgagcagcaccgccgccagcaccaccagaaggacagccgcgatgaccagtccctccatcagggcgccgggggcctgcagcaccgccacatcggcctcggccccgggcagggcgaacaccaggtaactgccgaacacttcgcactccgcccgcttccagcggccgtcctcccgcacatagatgtgcacgctttcggggtcgccgtcgggggccaggtagcgcagggtgtagctgtcctgccgggtgtcggagatctgtaccttccactgttccagcggctgtttgccgtgcacgttctccacgggatcggcggcggtcacggtgagcacggcatccgcgtcaaaatcgccgtcggccagaaagaccgggcggccgttttcccgttccgcctcactgggcagcgtcaggacatagcgggtgtattccgccgtgacggtcttgtcaaaatgcaggctgctgagatcgtcggtatcccaggcggcgtaatagccgtccttgaccggaatgtcggggaacacgtcctccccgaaggatgcgccgtaggcaaagttccgggactggatctcctcgtcctccaccacaaaacgcagagtgaactgggtcatggcctggggcagaccggtcacggcgcgcagctcgtcaaagctgatgggttcggcctgaccggcgtagctgatgcgccccagaccggccagcgtgtccgacacgtactggttgccggaaaaggagccggtctcggtgccggacaccgcgcccagacagcggccgccttcggggatctccaccagggtgcggcagtccgagaccacggcgctggattccccggcgcccagcacgccgccgatgtaatccccgccggacagggagcatttgacatagcagctgcggatggtggcacgggaaagtcccgcaatgccgcccacgtagtcgccgccggaactttccacactgccgtagttttcacagtttttgacggcgcccaggtccatacggcccacgataccgcccgcataatcctttttggccgaaatttcggcgcggttgatgcagccggtgaccacggccagggtcttgtactggaaattgagggaacgggtgccgtcctcggtcaggtcgtcctcggggtcaaagtcgtattccaccgacatggaacctgcgatgcccgccacgttcacgtcgccgtacaccttgccggtgttcacggcacccgtcaggcggcccagggtggagccgccgttgtccgcgtcggagatatcctccaccacgttttcgtcctgggtctgcatatcctccacgttgcggttgatcagattggtaatgaccgacagctggttgttgatggcgtcaaggtccccgatcatggtatcggtggaggaggacaggctgttctgcagcccggaagcgctgctgatcacctgggagagggatgcatccagcgcgtcgcccttgctggtgacgtcgctgctcaccggggtaaaggacaccgccggctggtccgccagggtggacaggatggactgtatgctgtcccccgccccccgcagggacgacagggcggactgcagccgatccgccgcctggcccagcagttccacggcctgccgcaccggctccgccagatcgcccaaatcccccatttcgttcagcagctggatggcggactgggcatgggtcaccgcctgttccagggcgtccaccgcgctgccggccgcactggcggcgctgctgagctgcgtgcggatgctctccagctgttcctccgtcaggccgccatccaccgccgaggaggcaatggaaatggcctgccccaggcagtcggcgcaggtctgggcctggcttttggccagttccaggtcgtccagggtggtccggatctcctccgcagccgactcggcggtggcgccgccgtcgggcagggtctccagcgcctggcgcagcagggaggctgcctcttccagggcggcgggaatgcccgtcacctgcccggacacgctctctccctgcccgatgacccaggccacccgggcggagacgtcgttgatctggccgatgttctggttgccccagtcggtcatggcggtgctcagcccgcccacggcgtccttggcggtggagatactgcccagcagcgtgttcacactgccggacaaagcgccggacgcattgcgggaatcggtcagcgcctggctggtcattccctgcagggtgttcagctcggtgtacagctgatccagcatgtcctcgtcatagcgcaggatgacctggggttccagctgtccggcgatgccgcccacatccttgcggccgttgacggtgccggtgttggtgcagccgtccagatagccggactgccggcccacaatgccgcccacgttgtagcccatatgttcatagcccacggcgccgctgttctggcagctctggatcaggccgctggaaaagcccgcgatgccgccgatgtcggtgccagccggcacgctctgggtggtgcgcagctgggacaggtcggaaaagtccgccgccacctccaccgccgtggtgttgatgtcgccctcgttgcggcactggatcaggctgccggtgttctggccggcaataccacccacgtagtgctcgccggtgatggtgccctgaaaccggctgctgatgatctggcccgtggtctcgttgatgcccgcaatgccgcccaccgaaccggcgccttccaccacgccctcaaaggcgcagtccacgatctttccgcagtttttacccgcgatgccgcccacggtatccccgtcggagggcgtcacctgccccaccacggtcagcccgcggacggtgccgctttgctggatggtgtcgaacaggccgatgccggcatcgctgtcggtgagggccaggccgctgatggtgtggccgttgccctcaaaggtgccgccgaaggtggggatgggcagaaactccgccgcgtccccgtccaggaccaggtcattgtccagcaccaccgtcctgttccgggaccaggtgtccaggcggcagttcagcgccagttcctccaggtcctgctggctggtgatgtggatggcctcgtccggaacttcggccgtggtctccgccgcgggttcctccccggcgtcctcggcaaagacaggacagaccacgcccagggcgagggccagcgccagcagaagggccagcagccgtcttgtgatgttgttttgttcagtctgcttcatcttggtcattctcctctgcggcattgccggaaatcaggttcaggtccacgtcgccgtccacggtggcgtgcatgatgccgctcacaacgccgtggatctcgccccggaccacgccgtccacccgcacacgaccccggccgctgtgccgtttggccacattgggcatggcaaaggcggtacggtccaccagaccgccgcccaccagaaggatctggggcagcacgaacatgaccagcaaaatggagataatggtgccgcggcccaggttctggccgatgccggtgatggaggcggtggaggtcatcatgccgatgagggtgcccgccaccgccaggatggtgcccgaggtgatgatggtggggaaggcaaagttcatggtctcgatgatggcgtcccgatggggcattttttctttcagttcctggtagcggttggccaccacgatggcgtagtcgatgttggcgcccatctggatggagctgaccaccaggtagctcatgaagaacagcggctcattgagcacggtggggatggagaagttgatccagatactgccctggatgaccaggatcagcagcaggggcatgcccgccgactggaaggtgaacagcagcaccaccagcacgatgaggatggacaccacgctgaccaccatgttgtccgtggcgaaggatttctggaagtcgtactcggtggtggagttgcccgccagatataccggctggtcggggtagtatttccgggcggtctccaggatggtgtcaatgaactggtaggtctcctcgccgctttcgggcagggtcaggtagatcagcatccggctgtactcggtgccctgcagctgctccttggcggaggtcatctgggtataggcggcgttgagcatttcggtctgttcgtcgtccagcgtgaccacgccggaattcacctcgtcacagacaaagaggaacatatcaatgagagggacctggtagccgtccaggttgcccaggatctgcccgtattcctcctgcttggcggcgtaggccgcatacaccacctgggccagctcatagtccaggccggtgagctcggcaaattcccggggcgtcagggcgtcggccagggtatagccgcccatggcctccacgttggcgatgcccatggtggactccacctcgtcatactgttccagctcatccagcagggcggcttccttttcgtagtcgccggtggggaccatgagggccagcatgttctcggaggaaaagttatcccggatcatgttcttggcaaactgagtctcgttgatcttgggggttttcagcgagctttccccgtaggcataggggcatttctgggacacggggaaggccaggaccaccgccagaacaaagatgaccggcacgacatagcgggtcttgtaggcaaacttgcccacaaagggaattttgggcacaaagttgcggtgtccggttttgtccatcagggggccgaaaagcatcagcaggccgggcatgaccacaaagactgacaaaagcgcaaacagaatggatttgatcaggcagatcgccatgtcggcgccgatcctgaactgcatgaacatcatggcgatcaggccgccgatggtggtcaggctgctggcgccgatctcggggatggccttgctcagggcgacgatgacggactcccggatgggcagggtctggtgttcttccttgtagcggttgcagaaaatgaccgcgtagtccagcgagagcgccagctgcaggatgctggtgaccgagttggagacgaaggagatcttgcccagcaggaagttggtgcccaggttgaggatcatggccaccacaaaggtcaggatgagcaccgggacctcggcgtaagtctgggaggtgaacagcagcacgatgacgatgatgatggccacatagaccatgatgacgctgacctcgctgtcaatggcctcctgctgggtgttgcccaggtcggtggagacatacacatcgtaggccgacagcagatttttgacctcgtccaggctggtcagacaggcgtcgtccgactcgtcatagtcaaaggtcacggcatacaaggccgagtcgttgttatagtggtcggcggtgttgtcgtactccaccgcctgcacgcccttgaccccggcgatctggtctttcagctcctccgcctgggcctgggatacgttggctaccatgacctgtgccgttcccagggtggtgaactgttcctccatcacatccagcgcctgacgggtcagggaatcctccggcagataggcggaaagttcgctctccacctccacccagttgcgggagaaggcggaaaaaatcagcagtatgatggtcagcagaaaaaacagattccgcttatccacgataaaagtggccagccttgtcataaagccgcctttggtttctttggtttcactcattgttgttatcctttcccgccttcccccgggtttgttgttcgccatgcagtttcatagcggctccgccgctatgcagcgtgccggagagccgtccctgccggatctccagctccgaaatacaggccagatcattcaccaaagtgcgcagccggtggcagaggcggaccgtgtaagtccccgtgcgccggccatgcaccgcattgtcgtgtcccagcagtgtcagggtgccggtgacggcgccgtcccgctcttccagccgcagacagccccgccggggccccagctggctttccagtaccaggatatacgtttccattcgggcaacctcccaggcgtgtgagcgcggggcgcatcggagagcaaaaaaactcgaaacaccgtcaaagtccttttcaggacaccgggcggcgttctgccgtccggactttggggcgtgctctgctgacggacccgcgcaatggtatccgtgatgcatcttagctccaccggaaaaaaatcacaaaggacaaaacccccgtccgtgtcgcaattttgacacagacaggggttttgaccgacagatttggcaccggggacgcgccttgaaagtcaaccaaagtatgatatacttctctatatcagaaagcaggtggaacacatggtggaaaaacacaacgcggtctcggagcagaccaaacagcagctggccgctgccctgaaaacccttatggcacagaaacccatggacaagatcaccatttctgacctgacggggctgtgcaagatccgccgccagagtttttactaccattttgaggacatctacgatcttttgcgctggatgctgcaaaacgaggccgtggccctgctggaacagcacgaaggcacgctgctctggcaggaggggctgctgcagctcttccgctacctggaagaaaaccgggccgtctgcctgtgcgccctgaaatcggtagggcgggaccacatcaagcgctttttcgaagcagacatttacgccatcatccaccgcacggtggaacgcctggaggaggacatcggcgcaggcggcgctctgaccgaaacggtggatgcggacctgctgacccactattacgtgctttccctggcggcgctgctggaaagctggctgctgggcgagatcgaccgcacgccggagcagctgatccagttcaccgacaccatcctgaacgaccagatgtgcggcgcagcccagcgtctgaaacaaggccctgccgccccggcggaagaacaataaatgaaaaggagcagcatcccgaaagatgctgctccttttttggtgccaaaaagatgtttttgcgtggatacgcccctggcgcaaggcttccgccttggtcagcggggcgctgtctgccgcggtgtattattcgctgacgcctgccgccccgtgcataaagcgatgcagggcgggtttcagcgggtcgtaacaggccaggatgcgccccacgccgaaggccgcaatgacggttccttcccggatgccgtggaattgccggaaccagagcagggacaggaccagcgcaatgatggataccgtgcagtcaaaccacatcttgaccaccggaaggggcttgtgcagtttgtccgcaatgacctgcatgatgccctcgcccggcagggagatcagatccggcgacaggtaaagcagaatgcccagggcgatcaggaccatgctgatggccagatacagcagccggaccaggtagacggctgccggcggccaggtcataagggcgggatcgggcagaaagcggtccgccagcagattggtaaagtcggtaaaatacccgaacaggacggtgcagatcagctgcaatacccgccagggctgaaaatcccgccccaggataagaaactggagcaggatgtacaaagaaaaaatgacgatgatccagttgcccatggtcagaaaggtaaagatctcactgagaacataggggatggagttgaccggcgacattcccaggtccgccgtcccggaaaacgacacccccatggccatgaggaacagccccgcacagtagagaaaaatccgtcttgccaatttgattccgtcttgcttcattccaactttcctttcccgttttgtacgcacttcgccagcagccgcatgagaacttcccgctcttcctccgtaagttccgcggtgatctgttcctccgccgcggcaaagatcccctgcaaagtctgcgccagccgggcgccttttggggtcagggatacatacagggatcgccggttgttggggcggttgcgcctttggatcagacctgcgttttccatgcgcagcaggatattgcccaccgtggcaggttcgatctcgcaatattccgcaatgtctttctgttcatgttcgccgtattccgcaagaaattccaggatcttgggctgccccggggacagcccaaggggcgcggtccgggcattgaccaggcgtttcatttgcagatacgttttcatccagagatggtggagcgaactcatggcggcctcccgtgcgaatgtcaaatagtcagctttctatcaataacaaagctaattatatggtttcatcttgttttccgtcaaggataaagtttggatctttccctttccggctgcggcgcgccaaagtggctctcccctcctttttgccctcccaaaacgtgtcgggcaaaaaaataagggccgacgctttgggaaaaatcccgcaaagcatcggccgtcgggacggggccccgtcccctttgcctgggctcggccccacttggcactgttccgccggaggaaggaatccttccccgacaaaccacgccgtgcagctttcccggtacgtcagaaaatgtctgcagtcattttccgcacgtccggcaaatttctgccgggtcattacacgggcctgtgtcagccactcttccgtcagtcacattgctccggtcaagtacatcatgcgtgggagcagacatacggccgacacaacggacaggatggattccatccctgtgggaccgctgtgtccgcggaccaggagcttccggcggaaattccggatgccgcacattccggcggccacaaagcggtcacaaagttttgacgagggcaacggagcggattctgccgatgctgttatcaccttcaggggtgcacgggaccacagccagctctgggaagaaaggagtaaaaacccaatctcagccaggcccgccgcgggcagaagcgtcgtccgggacaaaagccagtgttataaaaaggtctatggaagctgtcaaataaaaggccaggcgggcaacttccgaccaggaagatagcataagaagatcggccgcggcattttgccgttcgccgtttggttttctctcgctgccggggcagggtttcttttgccgccgcgcagttcggttccatcatagcgtcccggcacgggacgggtgtccgcacagcggagaagcagtctgttccatgtgcggtctcaggatcatccggttcctccttttccggagttctcagttctccgcggcaaactggctgcggatctgtctttgcaggtcccggaaccgcttgcgggcgttggacaccgccgccggcttgacctgcttgtatgcggcgatggatgcatcccgcaggggtcggcgcagcctgcccatgacgatgtggtggatgctgtcgggccggggcgtttcctcaaacacaaagcagaggtagggctgttccagaaccgcgcggaacagcacgtcctcacagttttgcagcacccgggcatatgcctgggggtcgtcccggggttccggttccttcagggggcgcaggacgtcgttggtcatgaaaaggcgggggtattctttctgctcggtctcggccagcaggtccagcacggcggccagttcctgaatgacctccacctgatgcagggggtcctcctgcggggcagccacgctgttttctggggcttcctcctccccgtcctcgttgcaggcgggttccaccaggcggatcatgcgcagggtagacagcaggccccggagctgtttggtcgaaatgcccatctgttccgccaggggcgcgcacagacggtcgggcagattttccggcgcgtagggcagattctggcgcaggatcagcttgttcagctgtttcagcagctgcaggtcctgccgcttgagggggccgaaggcctgccgttccacaacggcgagctcccgggcattgctccgctgcgcccgctgctggtacagggtgtaaaagtaggtggtaaaggcggcgccccgttcggcgtcgtaccacttgagggcttccagcagcgtttccataaaggcaacgccgtcaaaatgctgctggatctttttatttttgcggtagacgctgcgggcgctgacttcgctctgatacagggcgctgccctcgctttcgggggtctgcagcgttttttccagctgctgttcaaagcggtggtagcgcagcagcagttccgccagttccatgcgctgacgggtctgctgcaggcgttcctgaggcggcagcgacaacagcggatggtggttgatctgttctttcagggcctcccgttcccggtcggtccgttcctccttcatggtattcatggtccgcctccgtcacagttccagcatggtacggatcatcttgtccttgtcctcgcagtccataccggccaccagatccaccagggcgttcagggtgaacagcgcggacacatcatagagtcccgcctccttgtcacggccttcctgccgccggatctcgcagtagtagatgccgctgatctgggtgttgcggcggatcttttccgcgtaggacagggcgctgaacagcaccaccggataggtcttggtgccaaaggtcatgcaggcgtagtagcaggcatcatcctgcaggcattcgatcatggcggtgaacaggcccagcagcaggtccttgtcctggcgttccggcacggtaagttcccggatggtccagttggaccggcccaggctttccagctcggcgcgaaggatgtccatatttttgttctgggggctgttctgctggcggaccgccacgatcacgccctcgtccccgggctgcagcgtggcatccacaatgggaacgatggggaacgccgcctgcgtcagcgaggtggacagggtaaagttgaccggattgaccggtttgggggtcaggataaaattgctttccaaggggacagcggtaaagtagatacgtttcatggcaaatgcctccgagtcattctgtcagggcggcgccgggccttggcggggcttccgcggaatgtttcgacaggtccagtatagcactgtcaggaatcacccgcaagaaatcccacgccgcagcgccggttccccgccgtgccgggtcactccggctggttgtcggtctcgggccgggccgcttcggaagcagcctcgggggccgcctcctcaccggcgttgccctcgtcctcgaaagcctggtccgggttcccggagacttcgggggccgtctcctcggcggcgggcgcctcggtcacgtcctcagagggcgcgggggtcgcatccggggtctcgggctcgggactgggctggggttccggcgcaggctcggcggcttcctcaccggaagcaccgccctcctgggcatcctccgcgggctgctccgccggagtctcctccaggccgctgccgtggtcgatgtcctcaccggcagggagttccggtccggcggtcacgtcctcggcgggcgtgccggtgatgtccgtgtcgggggtctccgcaggggcgggagtttcctcggccgcgggggcttcctcaaggctggcagtctcttcgggagcggtttcctcggcaggggtttcgctcatggtctggaggtccgccggggcggtgtcggcctgggagaagaagatctgcaccgcgtagacgtaggtgccgtcacaggccgtacccacgacgaaggagtcatagctgccgttcatcatgttggtgaagtgacccggagagttgatccagttctccacgatgcgggagggcttgtacatggcggagacgtaggcgatgttctcgccaaaggcgtcatactgagcaccgagggcatccagtgcggtttcgggagcgctgccgtccggacgggtgtgggagaagctggagatcagctcctgggcacgggtgtcggcggctgcctggtactccgacgcatagcgcagtgccgactggccgcggtcggtgcgggcctggttggtcaggttcgcgatggtgttgttgtagtactcgcggtcgtagttatcgccgtaggaggggtgatagctgttgtccttggcgccgcacatggtgcagtagccatccacgtagttgtggtcaagcacgtcggtgaagtcggtcttgtaggacttgctggggtcctcgttgcaggtgtgcagggtgtaacccacctcggtgcaggtgggcggcaccacggtcacggtgtaggtgtaggtcggctcggggttgtagtccgggtcagcctcgccgcagcgggtgcagctgccgtccacgaagtcgtggcccagggcttcggtgtagttgtccttgaagctcttgctctcgtcctcgttgcaggtatgcagcgtgtagccctgctcggtgcaggtgggagcgaccacgctcaccgtgtaggtgtaggtcggctcggggttgtagtccgggtcagcctcgccgcagcgggtgcaagtaccgtccacgaagtcgtggcccagggcttcggtgtagttgtccttgaagctcttgctctcgtcctcgttgcaggtgtgcagcgtgtaacccacctcggtgcaggtgggcggcaccacggtcacggtgtaggtgtaggtcggctcggggttgtagtccgggtcagcctcaccgcagcgggtgcaggtgccgtccacgaagtcgtggcccagagcttcggtgtagctgtccttgaagctcttgctctcgtcctcgttgcaggtgtgcagcgtgtagccctgctcggtgcaggtgggagcgaccacgctcaccgtgtaggtgtaggtcggctcggggttgtagtccgggtcagactcgccgcagcgggtgcaggtaccgtccacgaagtcgtggcccagggcttcggtgtagttgtccttgaagctcttgctctcgtcctcgttgcaggtgtgcaaggtgtagccctgctcggtgcaggtgggagcgaccaccgtctcggtgtaggtgtaagtgggttcggtcccgcccatggccttgccgaagaagatctgcaccgcataggtggtgttgctggcggcgtcataatacacgcccaccgacatgctcacgtaccggtcgctcaggatgttggcgcagtggccttccgaagccatccacagatccagaaagtcctgcgcggtggcagagccctggatgtaggcgatgttctcacccatatactcataggaaccggtgaccgccgtgaagcaggccgttccgtcggggcgggtgtggctgaagttctggaccagctcacgggcgcgggtgtctgccgcagcctgttccgtaccggcggccagttctcccagcccgttgtcctggcgggccttgttggtcagggccgccacatcggctgcctggacagggtcctgatccggtttgtcggtctggtcgccgccgtcactgccgccgctgccgccttcgttatggtcacctccctgatcggtgttgtggtcctgctggccgccgtcctggctgtcgccggacccactgtcctgggactggctgtcattgccggtctgctggtccgcgatctgcaccgcgccgctgtccttggcggtgggggccgcgggggtcaccgcgttctggttgccgggattcgcccccggccgggctccggtctccgacaggtcattgtcctccccgccgccggtatcctcggcggccgcggtatcctcctcgggggtatcgtcaggggtttccggtgcgttttcgtcgttatcggcaggttcgttggaaggctcttcctccatcggctgggtcacgcccgccggggatgccgcatccggctcatcgtccggccggaaggccaaacaggaagtaacgctcacgcccagcagggcggcagcggtcaaaaccgcaataacagatttgatattcatgggattcctctctttccggcgttcgccgtcgtgatgatattccgaaacgggtttcagattgtttttaccgaacatgatatttcctccttattacctgttgcatctattcaaaacggaatcggactgtttggagaaggactggtgtttcgtccctctgactatcttttagggaccgggaagtccgcaagttcacggggcaaaaaagttttttcaacgttattttcgggcgtctccttgttcccgcccgcacgattttgatagatgcagatcttgggggaagttcactgtcaaaacgaaaaaaaacaaaaaaagcccccgccgctgtgtttccacagaagcgggagctggtttcgtattttaaggttacgggcacatcactgccccggggaaaatgcggggcgggagggcacagaacgggtcaccgcagatcactggggaatgacctgggatgcatccatccggctgacggtgtagtccgtcacctcgggggacacccactcgttttcaaaggataccgaatctttgtacagatgccggtccatgctaaactgcgaagaatccacctctgcattgccgtcgccgtccacgatcaggtcatcgacgtaaatgcagccgctgatcccagtgccggtgtaggcgtcggagcgtgagatgagggaaacaaagtcgtagtccaccgtgtactcgatgatcaggcggcaggtcggctgattgtagcccaggtcatccgggttctttgcattcaggaggatgcagctcttataagtaagattgtacagggtggacttttccagcgagtacccatccggctcgttcagggtacggttgtcgttggggccatagatgccgttggcatcgggggtgccgatattggcaagaaccacctcatccagcgcattcttgatctggctccaggcatcggcgttcagctcatccagggcgttgagatagtgggaatccacatccgcctttacaatgagggtcttggttttcagccggtattcgctgctgtccagcgtagcggtgatggtgatattttcctgatcggaaatcccctcatagcggtcggcctcgtacacgatctgggacgccgggttgtccgacggcaggttgttgtagatggtcagggtaccgttgggggaaattccgttgaagtggagttccaccccgccttcctggttgaagaagctctcatcaaagggatcgatggtgttgggatcgtcggtgctgctgctcgcagccgcgacggactgggtcccgcccgaggcggtgtctttctcccctttgggcagcagcacctccgcaaagccgctgagcatccatatcacggctgcgatcaccacgatcagcagcggaaggggcaccttccatttgccctgtcccgccgaagcgccggacgcagcctgggcaggggccggggcggctttcggagcagcagcctggacccgcggggcggcagtccgcactctcggggcagcccgcacaccggtcgatgcccggggcgccgcggaagcctgtgccttctgggcctgggcaagtttctcgcgcagacggtccgcttcggctttggccttttcatggccatgatccgcggctttctggaaccactccagcgcctgccggtcatccgcctcaacgccggcgccgtcctgataacagacgcccaggttatattccgccatggcggagccgttctccgccgctttacgataccattcaacggcacgggcctggtctttctccacgccatcgcccttaaagtagcaggtacccagatcattctgggcctgcgccaaaccctgttccgccgccttgacaagccaggcaatggactgctcgagatccaccggaacgccgtccccctgctggtagcagatagacagattccgctgggcatcggcatctccggcatcggcgccgcgccggaaccagtaaaccgcctgatccgcgtccttgttcacgccttcgccgcagatgtaagcatatcccagctcgttatacaccgtggtatcgcccagggcagcggcctcctccagccaggccactctccccgcagatttgtcgtacctgccgatggcggcagcctgctgtgcgttaaagggcagtcctgcctcccgggcctgttccggggtcccgtatgcctggtacagcgtgttcagcgggatctccgcttcgttctttttgccgtcctctacggggctcagcttcaccacgggtccctgcgcgtggtcccaggcccactgtgccgtttccggcgtcagggtgccggcgcccatggatgccagcaccagccggcaggcgttcttcatttcctcgtcctgcgcacagtcgatggcctgctccagcatcatggcggcgtccatccgcttattgctcagcatcagacgaatggcaagccagtatttctggctggcaccgccccgctcggcgctgatcatctcataatgcagggccttttcctcatccacctcacagccgtagccctcccggcactgcttggcgtaggccgcggcagcctcggcattgtgcagttccgccgccataccgtaggcgcggtggcattcctcgggcttgttcagctggtccttgccccacagctttgccagcttgagccagatctgctggcattcttcctccgtatacacgccacggccgatcaggtctgccgcacgctgcaaaaactgcaccgcgcgctccagctcgcccatacgggtacaggcatcggctgccgggatcagagcatcgggcgtgccccgctcggcactgcggatcagctcggtcaaagaggtgtgcgcctgggcgggtttatgggcggcgggtgccgcggtcagctgctgcagttcctgctccgcggcctcgcttccggcctgggcggcactgcgcagatatttttcatacatttcctgattggcgggcacgcccttaccgatgcggcagaactgtgccagcgcatacagcgcgtcggcgctgtcgggatcaatatcctctgcattgcacagcgttttgaagtccatatcctcatacttaaacatctgtctccatcctttctattcaggaggaccgcttccgtccggcggtccgttatattcccggtcctgtcaggattatagggcgcccgtgcgccgaaagttcactttccggcacggcccgcatcaaaaaaacttttattctcattatactagtccggcggcattttgcaatcggccaatctatcccgcggcctgacgcagcgtcggaatatttttcatttttgtttcccgccaaggttgaaccttgccgaattccgggactataataccaagtgtaagttctttgcacctgtcctgtacatattaaaggagggttttatcatatggcaacgtcccaagaccagctgcgcgcccagctttacggcgatcggctgatgcagcagtcagtgctgctgcagaaagccgtgctggtgttcatgacctcgaccctgtataaactcatcccgccggagaagttcggcgccgtgatctgcgcaggctgcgcccagccggagcagaagaacaggcgttccatcctggagcgcttccgcatctgggaagcgctgcccgacgatgacggaaagccctccgccaaagatccggcggcagacgaatacctggcacgggtactgtccggccccgtgtccgcgcagctgcgccgggatattttgagcacgatggatctgcagtcctgcttcaagctgtttgtgtttctgccgaaatacaaggccggatgcagcctgtttgctctggccaagtcacaatgccccgccatggcccaaatggatgaaagtcagtggcgtgatacctgctgtgccgccatcgacctgcgcaacgaatttgcccacgtttccgcctccatgcccacggccgccacagtgcaaagctggcaagattcctacgctccctggatgcgggtggtggaactgctgctctgcaacgccaccagggcggagtacgacggcgtccgggaagcctacgacggcgcggcaaacattgcctttcattccgttcccgagattgcccgggaaatgcagggcgtgatcacctccgaacagatcgaggaaaagctgggccagggcggttttaccatgaccgacggctttgtgagcgccaaactggatgacatcctgcgttatctttcggaggaagtccgcaaggaggaggagcgcgcccgggaacagcgggagcgggaggaactgctggccgagaaccaggcccttgccgagcagaaccggctgttcctggagcagggttacgccctgcagaaaaaagaagaggacatccgccaccgcatggcacagaaaaagctggacaaagtccctgcgctgcatcttctgcgccagtatgagggcggcgacatggaccagcggacgctgcaggagctggtccgcacccacaccatcatcctgacccccagcctgctgaacagtgcgggcggcaagtactttttgggcagccgtctcctgccctgcgccaaaagcgccgagcgtcccctgcacatggaacgcaccgccatgctgcgcctgatccgcgacattgaccggctggatacctgccgccggcagtatcaggccctggcccccctgggtgacggatacgccgaggagcgccgccgtctggaggatgtcatggccccgctggagcagtccaagggttcctacgtgttcgccaccgacatgctcaaggtgaaactgctgggcattgccgacccgctgtacagcgacgacgccgccctggtccgcaccctggaagagcacccctttgaacggtactgcattttcattagcggcgccaccgagctgccccggctcatcgaccgggccaagctgccctttgtgaccctggtgcgggtgcacggcaacgagctgaccggtgtgggctgcatggtgttccgccattttctgccctttgccgacgcgaacatcgacgaaccgctggtgcagcccctgctgcaggccagcttctcccagaccgaccgcctgctggccatgaacgatgccgacgccgccaaggccgcatccccggcgcccgcgccggctccggaccccgttgcggtctccgccccggcacagcccgcccggaatggggcggacagccccgaaatttccgtctcccgcacggaatactttgaccccttccccatcgccaaagccgtgcctgcggcaaaagaacccgctcccgcggcgcagcttgccgggaacgaggccgcggaaaagccggaagtttccgttgccaaaaccgaaagcagcgaggcccgctctgccgccggggagccttcccatggggaaaccgcccccgctttccggcctgttgtcccccggcacgatgccgccccggctcctgccgcacaacagcccgcccccgccgccaacgccctgcacggcacggctccctttgccgccgggctgcccctgcgccagatggacgagacgcccctgcccttccccggccggccggaaagcggcatggtcctttacaccgaggatcaccagccggtgaccctgggcggcctgctcaccgaggacggcgagcccgccgagggcggcgagggaatgctcttcctcaccgacaccgagggctgcgtggccaagctgtacaatcaggagcatctgaccgtgggccgccgggacaagctggcggaaatgctgctgcatgaccccggcatctccgggctgtgctggcccacccatatgctgtacaccaaggacggcgttttctgcggctacaccatgccccgcgcccccaaaaacgccatgccctttgccaagtccgtcctgaagatcggctcccccagccagcgcaaggccctgatggccagctggacccgcaaggacctgatccgcacggccctgtccgcggcgcacattgtggcgcagctgcacaagaacaacatcctgatgggcgacgtcaacggcggcaacttcatggtggacctcaacgacagcagccgcgtctttgtggtggataccgacagcttccagttcgggggcttcccctgcccggtgggcatcgagaagttcacccatcccggcatccgggagcggctgggcatccacggccccatggatttcaagaccatcctgcgcaacgagaacgaggacgactacgcctttgccatcctggtgttcgagatcctgttcctggggcagaacccctttgccaccaagaccgatctggactttacccaggccatggcccagcgccggtttgcctacgccgccgtggaccgcagcggcaaggactttgaagtgcccgacggcgacaactggatgatctggaaaaacctgcccaaaaaggtgaccgaagccttcggccacaccttcatcgactggaagtccaccaccgccgcggaatgggaagagctgatgcgttcctacctgtactgcgtggaaaagctgggcttcagcgacgagctgtcccccgccaaataccgggagttcaccccggacaatcccgtgtacatggaccttgtctgccccttctgcaagcgggaattcaacctgtaccgaaaaaaggcggagcgcctgatcgcccagggcaagccgatcttctgccgcaactgccgcaattccctggaaaaccacaaaaacgaccgctgccgggtgacctgttcccgctgcggcaaggtctttgacacgacggtggaacaggccatcctgatcgagtccaacctggccgaagccctctgcgaggactgccgcacccgggaagtcacctgcggcggctgcgggcgcaccttccgcatggaccgcaagcggtacgacgagctgaaggaaaagggcacccgggacatctactgccccgactgtgccaaaaccgagaccgtggtctgcgagtgctgcggggagagttacaccattccccacggcaaaaaacggacgatggaaagccgccatcagaatttcttctgccccaagtgctggaagcgtgttcccgccacctgttcccgctgcggcaatatgttccgtatcacggtatggcagcagaaacgcaacgatgacatgcaccgtcagcccatctgcgaggactgccgcaagcagttccgcccccgccgcggctgatccttcgccgcctgccaatccgtctgctttgaaaggagtttttccctatgcctatggacaataccccctccatcaaggacctgttcctgcaggacagtgagatggccaacaaccgcagcatccgcatcctgctctgtctgtgcatcgactgctccatctccatgcagatcagcggtgccatccagcagatcaacgccggcatcaccgagtttctcaaaaaagtggacggcaactctctggcgcgggacgccgccgagatctgcatcgtcaccttcggcaacgacgcccgggtcatttatgaattcggcacggcggaaaaggctctgcagaccctgaccgcccatcccatcgaggcccgggactccgagacgtccctgggcgccggggtccagctggcggtggaccacattgaggagtaccgccagcgcctgtccgtggtcaacaacaacagctacaccccctggctcatcatcatcagcgacggagactcctccgagccggacagcgtggtgcgggcggcctccaaccgggtgcagaaactgctgcggtgcttcaagctgaaaaccatgtgcctgagcatgggcgacggcaaccgcaatctgtacgatttcagcatcgacaaccacgtggaccgtctggaaaacctgagcgtgtccaaatttttcgacaacctgagccgcaacgtcagccaggccagccgcaagaccatcgagtacggcggcctggaagcccccaccgactggcactgacccctccgggcagccagcggctttcattcccatgacaaagcggccccgcggcctttgtgtccggcgggaacatcacaaacgggaggatctaccttatgcatgcaaaacttgccagcggcatggtctgcggccgcgcccataccattgccgggctgccctgccaggactgcgccggcgggtatcaggacgacaccctggccgtggcagtgctgtgcgacggggcgggcagctgcccccacagcgagcgggcggccgggacggtggtccagtggctgccggggtatctggcccggaatttcgacgctttgtacgccctggatgacgccgacaccgccgaactgctggtgcagaacggccagaccgccctgtccgtcctgggcatgcccctggaggaatgctactgcaccatgctgttttatgcccagcaccgggacgggcgctggctgtgcggccacatcggggacggctttatcttcgagaccgacgccgaggggacccgggtgctctcctacccggaaaacgggcagttttcctacgagacatactttctgtccctgccggacgccgcccttcacctgcggctgcagcggggcgtcgccgcgggagcacactgccttctgctggccagcgacggcagcgcagatgccctgtacgaccgggacaacgcctgccccgccccggcggtgggggtgctctgcggctggctttccaatgccgacaaccagccggaggaagtgtccgccgccttccaccgggccatggaggataaaatgtccgtccacacccaggacgacatgagcctggccgccctgtggtgggatctgccggagtgaccctgccggctgcttttccccgtttttcccaaaaccaaacgcgccctttcacagcgtatctgccgtgaaagggcgcgttttttcttatagggtcagctcacggggggatcagaggtcccggccgttggaggcaatgacctttttgtaccagtagaaggaatccttgggcatacgggacagatcgccggtgccatcgtcaaacttgttgacgaagatcaggccgtagcgctttttcacctcgccggtggaggcgctgaccaggtcggtgcagccccagcaggtgtagccgatgaggtccacaccgtcggccactgcttccttcatctgctccacatgctggcgcatgtagtcgatgcggtagtcgtcgtggaccttgccgtcgggggcgatctcgtccacggcgcccaggccgttctccacgatcataatggggatctggtagcggtcgtagatctcattgagcacatggcgcaggcccagggcgtcgatctgccagccccagtccgaagccttgaggtaggggttcttcaggttttcgctgccgttgccctgggtggtctcgccgtcggcggcggtcatgctcacgcagctgctggaatagtagctgatggtgaaaaagtccaccgtgccgtttttcaaaatttccccgtcctccggggccatccggatgtccaggccgttgtcccggaaataccgcagggcaaagccggggtaggcgccccgcacatggacgtcgccggcaatggagttgtggatctggctgtactgctgggcaaagaacacatccttggggtggcaggtgtaggggtagggattgtggtaggccagcatgcagcccatcttgttttcggggtcgatctcatgggccatcttcacggccagggcgctggccaccagctgatggtgcatggcctggtagcggctctgctcgcacacgtcggcggggtccagcatgccggcgcagaacaccgcgccgaaattctgggtgagcatattgatctcgttgaaggtcagccagtaatggatgcgccccttgtaccgctcaaacagcacccgggcaaagcgcaggtaatggtcgatgagctcccggttcttccagccgccgtaggccagggagagatgcagcgggttttcgtagtgggagatggtgaccagcggctcgatgccgtacttttccagctcatccagcaccttgtcgtaaaatttcagccccttctcgttgggggtgagctcgtcgccctgggggaagatgcgggaccaggagatggagaaccggtagaccttgaagcccatctcgccaaagagggcgatgtcctccttataatgatggtagaagtcggtggcttcatggttgggatagaactccccgggcaccggcgcaggcggggtcaggcggcgttccttgctgacactgccgccggtcaggatgtcggcaatggaagggccgcggccgtcctcgtcccagccgccctcatactggttggcggcggtggcgccgccccagaggaagttttcaggcatctgcaagtcagtcatgagcgtctcctttccgaagttcagacgatggtcagcaggcaggaaccgtgctccacggtctcgccggattttgccataccgatggcgcgaatgtactcatcaatgttggtgacgaccacgggggtgacggggttgtagcccttggccttgatggcgtccaggtcaaactccaccagcaggtcgccggccttgacggcggtgccgttggacacatgggcggtgaagtgctcgcccttgaggttgacggtgtccaggccgatgtggatcagcagttccacgccctgggaggtcttgaacatgatgccgtgcttggtgtcggtgatggacacaacggtgccgtcggcgggagcgtagaccttgccctcggtggggatgacggccatgccgtcacccaggatcttatcggagaaggtggcgtcggggacctcggtgatctcctgcgcggtgccggtgacggggctctggatctggatcttttccaccaggggtttcttttcctcggcgggggcctgctcgggagcggcttcctcctcgggctcgtcctcaaagccgaagatgcaggtcaggacaaaggcgcccacaaaggagaccaggatcatgatgatgccgtacagcaggttggacatgcccttttcaccgatgaaggcggggatggccagcaggcagttctgggcgatgtacagggagacctgcagcaggccgcccacgatgccgccgatgcccgcggcgatggccgcagccaccacggggcgcttgagtttcagggtaacgccgtacagggcgggctcggtgatgcccatgagggcggagataccggaggcgctggccagctgtttcatgttctggttcttgctgcggaaagcgacagccagagcggcgccgccctgagccacgttggagcagacctgagagacgaagatgagggcgtcggagccgccggtggcaatggcgttaagaccgatgggggtcagggcatggtgcataccggtcatgacgatgaaggggaaggccgcggccaggatgccgacaatgacaaagcccagcttggcggacaggaactcgatggcaatggccaggccgtcgccgatgatgccgcccagggggccgacgacgatgatggcgatgggagcgctgatcaggatggtcagggtgggatggaggatcagcttgacgatgcgcggggtgatgcggtcaaccagcttgacgatgtaggacatgatccacaccatcaggatgacggggatgaccgagtagcagtaggtcatgggggtgacggggatggagaagaagtcgatgggatcgccggactccatcatggcggtgaagttggggtgctggaacacaccggcaatgatgagggccagggactggttgacgttaaagaccttggcggcgttggcggcgatcaggaaaggcatgaagtagaaggcggcgtcgccgatgaagttgatgacctgataggtgctggaggtgtcgctgacgagatggaaggtggtcagcagggtcagcaccaccttgatcataccggcggcagtcagggcggggatcatgggggtcatgcagccggtgatggagtccacaatgcgggagccgatgctcttgttggcattggagacgggagcggcagcgccctcatcggtgggcaggcctttctgggccagagcgtcgtacagttcgttgacctcgttgccggcaatgacctggaactgatcctgataccagttcacaccggagatctcgggcagtttcttgatgtcggcctcattgaccagcttgcggtttttgacgtaaaaacgaagtctggtcatgcagtggaacatgcgggtgacgttgctcttgccgcccagggcaatgaccagcttttcagctgactgggaataatcctttttcatggaagatttcctcctcaaaaaaatcgcggtatttctatggaaaggagcgccggtgttgtcggccgtacaaaaccggcgggcccctgtgccaacaaaagaagatcaggtctgcgcgtccttgcggcgcgcgtgctcggcgtttgtctggatgtggatggtcaggtacatcatttcttccttgctcagctggtagccgtagcgctcttccatcatcaggaagatcattttcacgcagccgtaggcttcgcggtactgctggctgaccagctggaacaggctgtcgtcctgctccgcctgcagttcctgatgcaggtaacgctgggcaaaatatttcaaatgggtgagaaaacgctgataatacaggctgttgtcgtcaaagtccaggtcggaatagtaggtcttgaccgtctgctggatgtcgctgacgatggcagcgatcttgtagctgtcgttgccgctctggttttcctcggcgttgacaaagtgcagggcaatgaagcccgcctcgtccgggggcagttccacgccgaaaacctctttcacgcgcaggagcatctgctcgccccaggtgtattcttttttatacaggcgcttgatgtccaggagcaggacgttttccagggaaatgccctcctggtagcgcttgatggtgcccagaagatggtcgctcaaagacaggtagatgctgctgttgaagctgacatcctcggcagccttgacgccgtccacgaactcctgcacgaagttcaggtattcggcggggatggaaagcaaaaattcctggatctgctggatattctgtttttcctgggggtaaaagacctggccgatgcggctttcatccaccgtatcgccccggctggcatggaagccgatgcccagtcccttgacgatgacttcccgcccggcgtcgtcccgggcgaataccagattgttattcaggatcttgacgaccttcatgatccagcctcccaaaagaaaaaagggtgttttccgcagaaccctgtgtgcagtccaaccggcaacaaaaaaagacaaaacctatagttacagcaatgcccttgctgtgaccacaggtcttgcctgaacgatacatatgtactccagtaacaagccggctgaattgtctacaaagaattatacctgtttcgttattttttgtctatgtgccatgttgcagaaaagccgcgcccgtttttgtcggttttgcacaagaagttcccgttatcccggtctttgcccgctccgccggggcgaagggcgtgcgggggcatcccgatcacggtctgcatgccggtttttgccccggtccctgtccggcgcaaaaaaatccccggccgggggatggtccctaggccggggatctgctgttttatgccagtgtatgccgggcaatatccacccgggccgcaccgtcgctgtggagggagatgccctccgcctgaagcggcgtatccagcagggcggtgatcgtccgctctccgtcgttgacgaacagctcggcacattcgccgtccaggatcagccgcagagccagcttgccgtcccggggctgtgcggggatgcgccggatgtgcgggatgtcccgccgggtgccgcagcggctgcggtcaaagaccagctcgccccggtccgcctcccagcgcacctgggtgaacagaccgccgccgcaggcaaatcgcagcgtcagggcgcggcagtcggggctctgggcggcgtccagtaccaggtccaggtccagataccgcccggccagccggggcaggtcggcgtcgccgtccaccgtcaggccgcggagcaagacctcatcctgccagaggctctcaagttcccgcaccgggcgctggcagagcctgccgtcccggacgaacagttcccggggcagcgtcatgccgccgaaccaggaatgcctgcggggcgcgtcgttgctggtctcccagttctgcatccaggcgatcatgacccggcgtccgtccggggtcaggacggtctggggcgcgtagaactccatgccgtggtccagcatctgaacgccgcggcggacaaagcggtgcgtcccggcgtcgtagtctcccagcagggccagggtgccgtacccggggcggatctccgggtcgtccaccgggccgatgctctggggactgaccaccagcacctggctgccgtccagcgggaaaaagtccgggcattcccagatcgcacccagtgtatcccggctggcgtccaaaacggtcacgaactcccagtgcagggcgtcccggctctcgaacagttcgatgctgccgccgttttccttgtggcgtccggcggccacgcagtaatagcggtcgccctcccgccagatcctggggtcgcggaaatcggcttcacaaaagccttccggctgctttctgggtggaatcaccgggttctggggcagcttttcaaagtcaagcccgtcccccagcgccacgcactgtgcctggaccggagactcgttggtgccgctgacgccggtgtacaaaagttccagccggccgtcgggcagttcgatggcgctgcccgaaaagcagcccagcgcgtcggcgggggtgtcgggagccagtgcacagggcaggtagtcccagtgcagcagatcgcggctgaccgcatggccccagtgcatgggcccccacttggtgtcataggggtgatactgatagaacagatggtaggcgccccggtaataacagaacccgttggggtcgttcatccagccgacccacggcgtcagatgcagccgcgggcggtcggatgcggggatggccgccccctcccgcgcctcgtaggcgcgggcttgttccagtttggttttatcgtgcggcataagagaagttcctctcttcttcgcggttccaccgaaagccaaagccgcgttttggcatggctttggcttttggatggcatccgcgcgtttccgttgatgggatggataagcagtgcttattccgcggtctcggcggtggcgggaacggtggtgtcggcctcgccggcggtctccacatagcggtcataggccgcctggtagacgtccagcagttcctgcataccgtagctgttcagattttccttgtaggcgttccaggtgtcgtcggtgatgccgccgtcgcgcagccaggtggcttcctgctcggcaacgtagttttcaaagtccacacgccacttgtcgatggcatccagttcgtcctgggtgtagacgcagtcgatgggataggtggttgtgtcgtccacaaactgcatccagtagtcgtacaggtcggtcagacgctcgacagcgcggggctccatctcaaaggtggtggcgtagtagtcggacaggatcagtttgggaccgtagacttcgtactcgcccttgacttcgccggcgctcttgccgaaggttgcctgggcttcctcgtcggtgatgctctgccacaggccgttttcgtcctgctcggtgaagtaggtgccgatggggccgtactgcagctgcatgacgttttcggggtcataccactggtcgtagaatttcagcaggttgatggggctttcgcaggcggaggtgatgctcaggttgccggagttgatgccgccgccgtcgcggacggtaacgttgtaatcgccgtcggggccggccagtacgggcaggaacacatagtcgtcggcgtagctgcccatcagttcctcaatgtaccaccaggtggcaacgcctacctgaccctgagagcacttggccatgtactgggtatcggtctggctgaaggcttcctgatcgatcaggccctcggcgaaccagtcgtggaaatattccagcgcggcgcggtagccgtcgtcatcgctgacgaagttgacggtgccgtccggctgcaggaccaggtcggcgcagatgtcgttggtccagttggtgaagccgaagcccgcatagaagatgttctggccccagcaccactggtcgatgccgaaggacatggggatggtggaaccggcggcgttgccgtagtaggtggcgctcatgtcgttttccttgaaggcttccagggcgtcgtggagctcatccagggtggtggggacttccaggcccagctcatccagccatgccttgttgatcatggaatactggggaatggtgtagatgttgtagtcctcgtccttgccgatgccggcggtgcccatctgctcgccggagggcaggccgtagatgcagccgtcgtccatggtgatggcggcacggatgtcgggatgctcttccaggatcttggtgaggttgggcatgtattcctcggtgatgtagggggtcaggtcgatgaaggtgccgtcctcgccgtagttggtcaggtcatagttggagaagcccaccgcattgaaggcgtcgggcagttcgttgccggcaatgcggatgttcacctgctcggacaaagagtcgctcatggtctcccaagtgatggagatgccggcgttttcggccatggtgttgagcacggtgttggaatcatagccgccggacagggccgagatgccgctgatgatattgaattcggtctggtcggtgttggtgttgacggtgccgggttccaccgtgttggtgtttccgccgccgcagcccaccaggctggcggtgacgcccagcagcgcgatggctgcgccgatgcgtttgatcgaagttttcatgatggttctccttttataaatactgtgggtggtgttcccggagtttggggtgggtgaccgctgtgccttagccttttactgcaccggccatgaagccctgttcaaagtacttctgcacaaagggatagatgatgagcatgggggccgccgccacgatgatggaggcgaacttgatcatctcggtcagtttgttcagctcggcatagccgcccgagatcatgctggcctggctggcggaggtctcgctggcgatcagaatgttgcgcagcaccagaggcagcggggcgcggccctcgccggtcatgtagatcaaagcggtgaaccagtcgttccagtaggccaccatgctgaacaccaccatgaccgccatgatgggtttggacaggggaatgatgatatcccagaagattcgcagcttggaagcgccgtcgatctcggcggcctctttcagttccttggggatgctggtctcgaagaaattgcgggcaatgatcatgttggacactgccacgccgccgggcaggaacatggcccagatggtgttgagcaggccggtatccttgacgatgaggtaggtggggatcaggccgccgccgaagtacatggtgatgacgaagaagatgttgaagaacttgcgtcccggcaggtcggggttggacagcgggtaggcggtaatgtagatcatgaccaccgagaagatggtgccgaccaccgtgtacttgatgctgttccagtaacccagcaggatgctgtcgtccgagaacacggcggcgtagccatccagggtgaactggctgggaagcaggaaggtcttgcctgcgtagacatcatagggatcggagaaggacgccaccatgatatagtacagcgggtaggcgaccaccagcaggatggccacacacaggacgaccagcaccgcatcgctggcgcggtcggacaggccgcccggctttttgccgatggtttttgtttttgccgacatgtctgtccctcctttacacgaactggacgtcgctggcctttttggcgatgcggctgacaatgatgagcagaataatgttgaccgccgtgttgaacagtccgatggccgttgagtagctgtactcggcgtgctggatgccctgctcgtacacatagaccgcgatgatatcgctggtggccttgttcaggtcggtctggagcaggaacaccttttcaaagccgatgttcatcaggttgctggcactcaggatgagctgcagcaccgccatggggaccagggcgggcaggtcgatgtggaggatgcgctggaacaccgacgcgccgtccaccttggcggcctcgtacagggaggtgtccacgctggacagggtggccagatagatgatggtgccccagccggcttcctgccagatgccgctgataatataaatggagcggaacatggagctctggttgaggaagtcgatgctggtgcccagcagcaggttgatcaggccgcccgacgggctgaggaaaatacggagcataccgcagatgatcatggtggagatgaagtgcggtgcgtacaaaaccgtctgcaccacccgcttgagtttgtggaagcgcagctggttgagggccagcgccaggatgatgggaaccgggaagctccacagcaggctgtacaggctgagcagcacggtgtttttgatcatgcgccagcagttgggggaggtgaagaaatcctcgaaccactgcaggcccacccactggctgccggtgatgccccggctggccttgaaatcgcggaaggcgatctggatgccgtacatggggccgtatttgtagacgatggtaataatgaccgggatcagcagcagaagatacagctgccagttttcgatcaggcgctgtttcagcggtttgcgtggggcgaccgccgcatcccgccccgccggcttctgccatttgggccggggcttggcctgcaccttgttcatagtgactcctccttcatccggaccggttcatgaatcgtttcacgtatcttgtgaaaccaaaataccattctcaaatccaaaagtcaatggttatcactaaaaaaatccgcgttcacgagtgcttttggcgggttgcacaagctgttgccctcaaggttgtgcactttgttttggtgaaatagagtgaaatcgtcgatatttttcatgaaatctatttacatttcaccgtgtacagagtataataggatgtaaagaaacgtgtacactgaggtgaatttcatgaaaggtgaaaagcagaccgccaccatgagcgacgtcgcccgggaagccggggtcgccctgggtacggtatccaaagtcatcaacggcctgcccgtaggagaaagctatcgcctgaaagtcgaggccgcggtcaaaaagctgaattaccaggtcaaccccagcgccaaggcgctgaaaagcaaccgcaccagcaccattgccctcatcattcccaacactctcacgcccttttttgccatgctgacccattacatcaacatggcgctggaaaagcgcggatataaaatgatgctctgttttaccgagtacgaccgggaccgggaacaggaatttgtcagcatggtggtgcataaccgggttgacggcatcatcgctctgacctataatccaaaattagagatccctgccggaatcccctttgtgaccatcgaccgctttttcagcgtatcggtcccctgcatcgcgtcggacaacttcggcggcgggcagctggcggccaaaaaactggcggagctgggctgccgccgggtggcctgcctgcgcaccggctcctccctgaccaatgagcccagcaaacgcaaggacggctttgtcagcggctgcatggaagcgggcattccttttgaaatgtgcaatctgccggacggctctcccctgtcggcgttcgaagtctttctccggcacaatctgctggagaccgacacgcccctggacgggctgttctgcggcaccgacctgatggcctggcaggccgccaaaatggtgcgcgccctggggctgcgggtgccggaagatgtgcagatcatcggctttgacggcatccgcatgttcggcgaccaggattacatctgttccaccatcgtgcagccggtccccgacatggccgagacggcggtgagcatggttttgtccaacgactttaccggcctgcccccgctgatctgcctgcccgtgcgctaccagccgggcgggaccaccaaggattcgctgtaaaccggaaggagtctctgccatgaatctgtttcgtccctatggttccggtgaaccgcggcgggatgcccgcggccgcctgatcggcatcgaccgctatcaggatgtgctgggccgcaactggaaacgctttttcctgaccgggctggtgaccatcgcgggctgtctgcccctgactgcgggggtggcctacgccgtgctgagcagcagcctgctggtccttttgcccgtcagcctgatcggcggggccattgccgggccgttcatcgcctgcctgtacgatgccgtgctgcgggccctgcgggatgcgcccggttcctgggcgcagaattaccgccgcagcctggcccagaactggcgggccgccctgctgcccggggcgctgaccggcctgttcctcggttccgctgtatttgcgggcatgctgttctttgcctggagcaccgcagcgccctccggcatgaccattgcggtgtttctgttcagctgcctgatctttctggtgctgtccaccctttactggccgcagctggtgctgtttgaccagcgtgcggcggtccggctgcgcaatgccctgctgtttaccgtaaaaaacttctggtccaccctgggcgtctgcctgctgcagctggtctggtggcttctgatggtattgtttgccccctggaccctgatccttctgcccctggccgcggtatggttcgatctgtttgccgcgttgtttttgttgtacgaccgtctggatgaggcattcgccattgaaaagagtctggctcaggcctttcccgaacaggtcccccgtcgtgactgctgatgaatggaggtttttgtatgaaagatgttgttgcactgggcgagctgctgatcgactttgcccccgtatccaccgatgagagcgggtatcccaccctcaaggcacagccgggcggcgcgccgggcaatttcctggccgcattgcagaaatacggctgctccaccgctctgctgggcaaggtgggcgacgacgctttcggccgtctgctggtgggcaccctcaacgagcgcggcatcgagacccggggcatcgtgatggaccccgccgtgttcaccaccctggctttcgtcaccctggatgccaccggcaaccggtccttcagctttgcccgcaagcccggcgccgacacctgcctgcgcaccgacgagctggatctttccctgctggacgaatgccgtgtctttcacttcggcactttgagcctgaccggcgagcccgcccgttccgccacccaggcggcggtggcctacgccaaggaacacggcaagctcatcagctttgaccccaacctgcgcaagcccctgtggcccagcgccgacgccgccaaagagcagatcgagtggggtctgcatcaggcagacatcgtcaagatcagcgacgaggaaatcgaatttttgtggggcctttcccccgaggaaggcgcccagaagctgctggcggagtacggcgtgcgcctggtgtacgccaccctcggccccaagggctgccactttgccaacgcccagggctgcggcgaggtcgcgtcgccctccggcatccatgtggtcgacaccaccggcgcgggggacatcttcggcggcagcgccatgagccagttcctcaagctgaacaaggcccccgaggccctgaccctggaggaaatgcgcaccgtgacccgatttgcctgctgcgccgccagcctgtccacccagacccacggcggcatcggcagcgtggtggaggagagcctggtcaacagcatcctgtaacccatccaagaactgtcttttcgcccctgcttcgccctcccggcgcggcgggggcttttggctgtaaaaagaccaaaaaggggaccggaatttccagtcccctttttggttgatgtatagaagaaacgaaatgaagatgtctcagatcactgtgcaccggcctggccgctctgctttttgctgcggaccagcatgacgatgcagccgatggtggccacggccagcacgccggtgaccacatacagggccatctgccaccagggagtgatgggcaccaccgtggcattgccgatgttcatggcctggctgtgggtgaccgagtaggcgatgttcttggcggcacgctgcaccgcagtgacgatggcagggtcattttccagcccgtccagggttgccatacccatgctgtaaccgtcccagatatcctggccggccagcacgcccaggcggtagtccatgaagctggccatgaccgagcagtcggtgatggccgcgccgtccatgccccactcatcccgcaggatgccggtcatcagaccatggtgggcgccgctccacaccacgccgatgcggttgaaggagctcatgacgcccatgccgccgcccgcgacgctgccctcgaagccttccaggtacagctcacggatggcctgctcattggaccaggtggagataccgtagcggccttcctcctgatcgttgagggcaaagtgcttggtaaagacgtagacgccgcggtcctggatggcagccacttccacttccgccatgcggccggacagccagccgtcctcagagtaatactcaaagttacggccgcagtagggggtgcggtggatgttggcgccggggccgtaaatgcccgcgaacaccgtgccgctgtctgccggagcatggaggaagtcctcaccgatgcagcggccgatgttttccacgatctccaggttgaaggtagcggccatgacatcctcggaggtgtaggccatggcgctggaaccgcccatcaggctcatagtgaagccctgagggccgttttcgtccttagtgccgggcaggttgatggacggcaccggctgggtgatgtggaaaccgttgtagatcaggttggtcatctcgctgtaggggatctgacggatcagatcggtccatgcgggatcatccggttcggtgtccacaaaatcgttggcgttcagatctcccgccacgcccatctcgggcatggtggcgtcggggtagtactcctgcttgtagcgttccaccagggcggcgcggtcggcctcgtcatgggacaggccgtccttccacatctgctcggtgatgcgcagggacaccgcgctctgggggaaggtaccggtccagtcgctgcgggtcaggtaggtgatctgctggtcctcggcgccctcgtacttgttcaggtcggcgttgtcaaacaggttggtgatggcgttgcctgtggcggaggacaccgcgtaggtggtcttgtcaaaggtggggttgttccacttgacggccagactggcatcgccggtgccgctcatgcgggaggcatcggcccccttggcagccagaatgttgttgatggcgttgtgggcgtcggtacccacggtgaagtagtagtcgccgtcctccaggatgtaggtcttggcattgttggcgtcgtagctggtcaggtcttccttgtccaccgtgatggtgtagtgctcggtggcgccggcggcgatcatctttttgtcaaagccgcacagctccacggcggccttttccacgccgttgtcgatgtcatactgggtgtaggggctctggaaatagatctgcaccgtgtgcttgccgtccaccgcgccggtgttggtgacgtccacgctcacttcaaaggaatcccccttgtcctccaccgcaaagttggagtaggcaaaggtggtgtagctcaggccatagccgaaggggaaagccacgtcgccgtcgtagtcgtactcgccggcattgccgcggcccagaacgtagtcctcgtagcgggtctcgtagtagcggtagccgacatagatgccctcctgatagaccacatagtcctggttgcacttgccgattccggggtcggtgttgttctgggcggtggcgacctcatactccgcgccgttggtgtaggggtaggcgccgaagttctgcatggccggggaggagtggttgtccttgaggaaggtatccacgatgcggccggaggggttgacgttgccggccaggacatccgccacaccgttgatgccggtcatgcccacatcgccgatccacagcaccgcgtcgatgccgtagctgtccaggaagtccagctgcagggggttggaggagttgagcagcaccacgatctttttgaacacgccctgctccttcagtgcctggaggttggtgagcatgtcgatctcttcctggcagagctgcaggtagtcgccgtcggtcatatagctttccagttcgggcaggccgctgggcaggtcggcgccctcgccgccggagcgggccaggaccaccagggccacatcgccgtactcgctccaggtattgcgcagctcatcgctgtactcgctccagggcacctcattgatgcggtactggctcttgttgccgccggtagtgtcggcattgacccgggcatagccgcagttggcgtagaaatcccactggtcggggttgacagtgtccgcaccaaagacgtcctccagggcgtctttcagggtgacggcgtcctccgccgagacctggccggaaccggtgccgccgtacagcaggttgtagctggactgggagaaggtggtgaaccgggtgccttccgccaggggcagggcattgtcccggttgaccaggagggccgcgccctccgcttcgatggattcgcagagctgtttttcgtattccaccagttcttcctcgctgtcaaagctgctggtgaactggatctctgcctcagggtcagggatgacctcctgagtctttgcgttgagtgccacgctgatgacagaggagaacgcgttggtgatggggatcgccgcgatagccactgccagcagcaccgccgtgaccgccgtaagggcgacccacagcttgcttgctttcttcttcataccattgctcctttccatttccgggcgaagaaagaatgccgcgtcagcactgccgccattgcccccgggctgcgcccgcgccgcaccctgtatcttccgcctttctcactgaaccgattatgcgatgtttcacctttttttcacaacagtttccgcacaaccttgcctccagaccgcataaccttatcgctcgccccggggaaaaggccaaggcgggccgtttcttgacttgtttccgggaaaccgatatagtaaaaaacgatcaggaaggaggagccgtatgacggggatcgccattgtagaggacgaccgcgagcacgccgcccagctggaagcctgcatccgccggtatgcaaaagagcgcggatttgaggtatcggtgcggatcttttacgacgcggtgacgtttttggagaaatatgcggcggaggatcagatcgtctttatggacatcatgatgcccatgctggacggcatggaggcggcgcgcatcctgcggcagaaagacccgctggtggtgctggtgttcgtgaccaccatgcggcagtatgccatccagggctatgaggtggacgcctccgatttcatcgtcaagccggtctcctaccctgaatttgctctcaagttcacccgcatcctgggcaagatccgccgggcggatgccggcgaccaggtgtttctcaagaccgagaacagttttgtccgcctgcccgccggggatatcctgtacgtggaggtcaagggccattactgcgtctaccacaccctgtcgggggaataccgccgctaccagaccatgaaaagcgccgagtccgccctgcccgccgacagttttgcccggtgcaacaactatctgcttgtcaacctggcccacgtcacccgggtggacggcatgcgggtctttttgaaggatgaggtactgcccatcagccatccccggcgcaaagcctttgccgatgcggtcagccggtttatggagcgtcgcgggatatgagtacgtttttgtatctgtatctggggcggtacaccttccagagttataatctttttctcacctttgccctgtgcggggtctgtctggccctgttcgcctggcggatggagcggcgctcctgttttgccctgcgcctggcggctgtttttggggcaggcgggcttttgtgctttcccctggcggtcctttacactgaagtggataccctgcccgtgcgggtgctgtgttacctgatcatcagcctgctcaatttcggggtactggccttctgctggaaggacagcatcgaggagctgctgctctgcttctgttccggcacggcggcctaccagctgaccaacaagctctatcccctgctgcagcaggttctgggcatcgacgaccggctgaccatctcgctgttccatgtgggcatgatccgctggtgggaatggctgatctattttgcctttcatgtgagctgttaccttgccctgtgggcggtgttccgccccaggaaccggctgcatcaaagtccccgcacggcaatgcgggtggggcttctgtgcaccgtaaccgtattggtggtcaacgtgctgatctgcgtttcccgcacctacgaggcggaaagccgggcgctgaacatcgtggtaaagatcttctgcatcctgttcggattcgaggtgctgctgggctgttccaacatctttttcctcgacgagcaggaccaccagatcgacatcctgcaccatctgtggcggcaggacaaggcacagtttgagtcggtcaaagcgaacatcgacatcatcaacatgaaatgccatgacctgaagcacatcctggacaagatctccggcaagctgacctccgaggaagtggaatccctgcgcacggccatccagttttacgacgccaacatcaagaccggcaacgaggtcctggacgtggtgctgtgcgagaaggccatggcctgcctgcgggacggcatccggttttcctgcatggcggacggcacccggctggattttctcaccccggtacagacctacaccctgttcggcaacatcatggacaacgccatggaagccgtccgctccctggaggacccggaagagaaggtcatctccatggtctgccacgtggacggggacgatctggtcattgaggaatccaactatttcagcggtcccctgcatctgagcagcggcctgccggtgacggacaagcaggatgtctcccgccacgggttcggcacacgcagcatccagtacattgcccggcagtacggcggcgacatggacattgagatcgtggacaacatgttcctgctgcgggtggcctttcccctgaacgcccggcgtcaggccgacgccgtcctttcccccgcgccgtgaccccttctgcaaatacagcaaaaccgcccccggtccacaagaccggaggcggttttttcatggttggttgagatcaggcgcagccctttgtgtggggcgcggcgatgattacggcggcgtccgcgccgtcgatgtcccggatgacttcccccacggcaggcacggtgatatgccccgacaggggattcttgatgctgaggaccggcgtggtgacggtggcctccacctggctgcgctcaaaggccaggtcggtgtccaccatctcacagtcgatgagtttcaggcccttgcagtagcacaggggctgggtgccgatgatgcggcagtggtcaaaggtgacgttctcgcagtaccaggccaggtattctcccttgaccacactgtttttcaccgtcacgtttctggcatgccagaaggcgtccttggtgtcaaaggtacagttttcaaagacggcatcctcgatgtactggaaggaatacttgcccttcatgctcacatgggaaaaacgcagcccggtggagcgcatcatgaaatattcgctctcggcgatgcagtcctccatgcggatgccccgcaccgaccagccgaactccggcgaccggatgtcgcagccccgcatggtgacgtcggcacattcccgcagggccttgatgccgtgcaggcgggtgtcctcgatggtgacatggtcggaataccacagcgccgcccggcaaagctcggtcatttcgccgtcccggatggtcaggccatggtcatgccagaagggatagcgcagattgaaaaagcagcgttccgccgtcacatccgaacattccttgaaggcgctttctccgtcggcggggccgtcaaaggcgcagtcccgcaccgtcaggtcatggctgccgtacagcgcccgctccgcgtcaaaccgttgattttcaatactattcattcaaaaacagcctcctgttccctgtcttatcctgtccctgcgcccatgggcagggtatgcgctttcgtccggcaaaacctctgcgggcagccggggcgcgccctttcttcttttcccgtttttactatactgcggaagtcctgccgttgcaaatacctatatttcatactgcggtatagctttcaggtatggcccggagccgagcacaagaaaagccgctttcccgggaccggggagcggtccgggaaagcggcgagatgaaagagaaagtagatagcaaagtaagaagtgaggggatttaccggtgcatgacgttctgctcataatcccgcagggacgccaatgccttgggcgccagggggatcagggcgatcatgttgaaaatggtcatcaggccgatgcccacatcacccaggtcccagacgaactggtaggcggccagtccgcccacaaacagcatgaccagcgccagcaccttgtacaatgtctgggacagccagttgtccccgaacagataggccacattggaccgggcatagaaaaggatgcccaaaaaggtggaaaagctgaacagccacaggatcacggcgataaaaatgacgccgaactcgcccagatggtactgcatggccgtctggagcaggtccatgccttccagcccgtcggtgagggactggggcgtcagcagcatgatcatggccgagcagctgcaaatgacaatggtgtcgatgaacacgcccagcgcctgcagcaggcccgccttggccgggtggctgatatcggcggcggccgctgcgcagggggcggaaccggagccggcctcgttggagaaaaggccccgctttgcaccgttcatgatgacggcgcccaggccgccgcccgccacctgccgcaggccgaaggcctccgagaagatgcgtccgaacacggcggggagctgcccggcgttcttgacgatgataaacacggtgatgaagaaatagcaggccgccataatgggaacaatgaaatccagcacccgcacggtggcgtttttgcgcagcaccaccaccgccgcaatggccaccagaatgacggtggaccagaggggcggcagatggaaggcgttttcaaaggaggaggagatggtgttgccgatgacctgactgataccgcaccagcacaccagccccgacagcgcaaacagcacggccagcaccgatttgcggcgcttgcctgcaaacaggctgtggaggtagtaggcagggccgccccgccagccgccgtacaagggatctttttccttgtagatctgggcgagggtggcctcgataaaggcggtggaggaccccaccagggcaatgagccacatccagaacacggcgcccgcgccgccggcggagatggccgccaccacgcccaccaggttgcccatgcccacccggcatgccgtggagacgatcagcgcctgcacgccggaaatgccctcccgctgagaggagcttttgttgttttccagggtgacacggcacatttccgggaaaaggcggaagggcagaaaccgcgtgcgtatcgtaaagtacagccccgcggggatgaggatgagtaccagcagcgacagtcccaggctgctgccccccggcagcggaatggtgatcaggtctccccaaagcagatggtagatcgcctgaaacagcgccatgaacttccttccccctcattgcggcggaggcttccccgcctctcgcccgtgccggcgcggcggcgcaagaaaaagcccggcagtttccgccggtttctgttcgcttgcacccttcgcgcttttttcagctgtgccgttgattttgatacgaagttagtgtatcattaagtcacatttttgtaaaactaatggtttttataaatatgtttcgtttttttaatagatggaggatacaggatggaactgcggacggtagccacctttctgcgggtggcggagctgcaaagtttttcccgggcggcggaacagctggggtattcccaggcggcggtgacggtacaggtcaagcagctggagcaggagctgggcgcaccgctgtttgagcgcatcggacggcgcatccagctgaccgaggaaggcacacggttcattcccgccgccatggagctgctcaaggccgcccacaaggccaaggccctggtccatgcggacggcagccccgccgggcggctgcgcatcggcacggcggagtccctgctcatgagcgtgctgaccccgctgatgccggaatttcaccgtctctgcccaggggtggagaccgccgtatacaccgggcgcatctcggagttgttcggcatggtacggcaaaacgacgtggacgtgctgtttttcctggacaaaaagaccgatttccccgagtgggtcaaggtgctggaacgccccgagcccatcgtctttgtggcccaagcctctcacccgctggccgggcagcggggcattgcgctggagacgctgaccgaacagcccctgatcctgaccgaaaagggcgtcagctaccggtacgacctggaacagcttttggctgcacgggggctggaactccacccctttttcgagaccggcaacaccgatgtcatcgtgcggatgctgctctcccacggcggggtgtcctttctgccccggtacgttgtggagtcagaagtggcggcagggcgcctggccatcctcgacgtggactgcccgcccgcccagatgtggagccagctggtctaccaccgcaacaaatgggtcacgccccagatggagatctttctcgacctgatgggccgccgcatcggcccggaatcctgaaccgggccggtcctcacgaaaaaacagccttccccgccggggaaggctgtttttgatgattacgctggttgttccgcgggccggtcctcatcgggcgcaaagagcagcatatccagggaaaagacgccgtcctgctgtcccgccgagagggtcccgccgtatttctggacgatgcgctccatgctgcgcatgccgaagccgtggtagcgggggtcccgctggctgcggggcaggccgtccgcaaaggtcagctgccctgcaaaggggttttccatatggacgctgaccatgttgccctcccgggtgacggtgagggaaatgaacttctgccggtcctctggcaggcggcccaccgcctccaccgcgttgtccagggcgttgccgaacagggtgtacaggtccagttcctccataaaggccaggtcggggccatggaccagggtggtcagctcaatgccccgccccgcgcacagcgcccggcgctcggtgagcagcacgtccagggccgcgttgccggtgtggatgtagacatcgtattcctgaacgcccttttccagcttttccatctgccccgcggggatctgcccgtggaagctgcgcagcagggctttcaggtcgtggtatttctcgttgaccagttccatgctgctcttgccggcctcgtactgggcccgctgctggcgcagcatacggcgcatttcgtccacgtcgtgggaaaggcgggcgcgctccatgacgccgaactgcaaaatcagaatgaagatgccggtcaggatggagtacaggctctcggagaggatggccacctcgttgcgcatcgaattgtcctgggtcaggcgggccatgccgatgcacagcagcatgacgccgaaggagaaaacggccttgagtttgttgtcaaagttttcgttgcggcggcgggtgaaggggcggaaggcaaagaacagcaccgcaaaggtcccgccgtagcacagcaggtccaccgccagaatgcccaccgggtccgcggccagccgttccaccgggggcagaagtttcgccgccgtcttgaagctgccagcaatgtcctgggcgatataccccgacgacgcagcaaacagggcggtccatatggactcggcgtagcacagccaggtgcacaggatcagcaggatatacaccgccaccacgcagaaggtccgccccgccgcgcccagcaaagtggaatcccggagatagaggaagttcccgcacagccaggtcagcaccagggccgcgcaaaggctcgcagccgcccgcagcacaaaatggtcccgacggcgcagggggtaggcaaacagcagcattcccaccaccgcctgcacaaacagcagaggcaggcggatattggcataccagtccggcatattcatcctcggccaccgcctttgtactgggccagcgcctgcaagaactccttgcggcgggatttgctgacggacagccggtcctcccccaccacgacctcgtccccgtagacgccgcgcacatatttcaggttcaccagatagcaggagttgcaccgggcaaaatgggcaccctccagttgtttttcgtacttggaaaggctgccccactgcttgatgaccccgtcgtccgtgtggatgagcaggtcatggtcgaacacttccagataatggatcatgtcggaggtcaggcgcagcccgccctcccgggtcttgatgtccagcaccacgccggtctggcggtaggacagcacccgcatggcccgttccagcttggcggcaaagggttcgtagctgatgggcttgacgatataatcaaaggcctgcaccgagtacccctcaatggcatactgggtcaggctggtcacaaagacgatcatgacccggcggtccacctcccggatgcggtgagcggcttccatgcccgtcatgtcgggcaggcggatgtccagaaacagcaggtcgcagtcccggtcatagtggtccagcaggtccatggcccggtcataccgctggatggtataggaaaagccgggatgggcatcccggtatcgctccaaaaagcccagcaggcgctccgcctgttcctgctcgtcctccaaaagcccgatcttgtacatccgctgtcctcccggtgggccaaaacggtcccgattactcttttaataatagtataccggcgttctttctgtcaaacgggaaagcccctgtcacgccggacaaagccgcaagggatatgacggtcgcgtcatatcccttgcggctttgccatgcaggtttccaaaggagaacacgtatttttgtcagagaatccgtccctccgtgtcacggaagaaacggtcacagtcacgggcggccagttcggggcattcgtccgcgccgccgtggccgaggtgctggtaggtcagcagcgatgcaccggggatggcctgtgccaccttcagggcattttccgccgtggccagcgggtcaaggccgccgatccagatgaggacagggacattgatctttgccagggtatccagcatttcctgctcggtctgtgcattgcagcagctcaggctgccgatgttggggatttcaaactcttcctgggcacgctccatcaggatctgggtgtgctcttcatggttggccttgcgccgtgccagacgttcggggttctgggtgggccagggttccatccatgccattttttccagcgcctcgtaattacccacgatcttggcggcgtcgggatttttgcgggaggaaggccgtccttcgcttttcgggtcgcggaactggacgatgccgtcacagcagacaaaaccgcgcagcatctcgggatgatggaacgccgtataccagccggccaggttgccgtgggaaacgccggtatagtagaagctttcgatccccatgaccttggcaaagtcaaccaggtccttgccccagatctcattatagtcccggggggtatcgtcggtcacatgggtggacttgccgaagccgcgcatgtagaccaggaagcaatggtagtcatacggcggcttgcccagcatctccatatggcagtcggtcaaaaagaagttctgcgtggacaaaagatatttgtcgccggtgccgaattccttgtaggcaagggtgatgtctcccacctgtacggtcttgatctcgctcatgatgcaatgcctgcctttcttcgtcttgctgttttcgttttcagtatagcaaacggtcagggcctgcgttttcacaaaaaaatcctttattttcaaaattctcacctttccccaaaggccggcaggcgaatgcactattttacaaaagcagttgtctttttttaatgtttttacacgctgccacgtttatcatgggaatcactgaaggtccgaatattataaaaagagaagaggaagatgatttatgaacaagctcaagatcggttttatcggctgcggcggcatcgcctttgacaagcacctgcccggcatggcaactcagacagaccgcatcgatatgtatgctttctgcgacatcatccccgaacgtgccgaacaggcccgcgccaaatacggctgcgagggcgccaaggtctttaccgattaccgcgacctgctggcagaccccgacatttatgccgtgcacgtgctgacccccaacgtcaagcattgcgaaatttcctgcgctgccatggaagccggcaagcatgtcatctgtgagaaacccatggctgcctccgccgccgacgccaagcggatgctggatacctcccgccgcaccggcaagctgctgaccatcggttaccagtaccgccatatcgacgccaacaaggccatgaagagctacgttgagaccggcgctctgggcgacatctactacgccgagaccaccgccatccgccgccggggcatccccacctggggcgtctttaccaataaggcagaacagggcggcggccccctgatcgacattgccacccactccctggatctgacgctgtggatgatgaacaactacgaggtcgaaagcgtgaccggcgccagctttgccaagatcggcccctgcgccacccccgacgagatgggcaacgatttcggtccctgggatgcttccaaatatgaagtggaagattccgccttcggctttatccgcatgaagaacggcgcccttatcaatctgcgctgctcctgggcgctgaacatgatcgccaccggcggcagcgtgctgctgtgcggcaccaagggcggtctggacaacgccgacggcgtgcgcgccaatcacgtcatcgccaaccgccaggtggacagcaagatcgcttcccgcgggttccgcctgatgcccagcaatctcatcgaccgcaacccgctggtcatgcccaacgaggcggaagccaagatctgggtggatgccctgctgggcgagggcgagctcttcgtcaccgccgagcaggcttacaccgtgacccgcattctggacgccatctacgaatccgcccggaccggcaagaccatctattttgactgaggtgccgcgccatggaaggaaaacgccttgaacgcctgggggaatgggccaggcggaatctgaccgaatgcatcctgccattctggaccagcgactttctgctggacaaggaaaacggcggcttttacgggcgcatcaccctggatatggagatcgacaactccgagccccgcagcctgaccctggcagggcggatgctctatgccttttccacggcttatcgcacactgggcgatgcgctgtaccgcagccgcgccgagtatgcctaccacgatctggtcagccgttactatgaccgtgcccacggcggtgctttcgcctacgtggacgctgccgggcatccgctgaccgatgacaaacccacctactgcgaagcctttttcctcatgggctgcgcggcctattaccatgccaccggcgacgaggaagccctggccctggcccgggagacctttgatctgatggaagcacgggtacgccttggccccggcacctaccgcgccaacatgacacgggactggaagcccgccgagggcatgggcatcggccccaaaaagggcggcgggttctcgctgcccgaggggacgctggtctttccccatcatctgtgccaggcctatgtccagctgtacatggccacccgcgacgaggaagtgggccgtgctctgggcgaaatggtggactacgtctgcaccgccctgtacgatcccgagtaccgctgcttcaagaccatggtcctggccgacggttcccgcgtgggcacccgccagagctgcggccacgactgtgagctgagctatctgttgcaaaatgcggcccggctcttgcagcggcccgatctggagcgcaaggtcagcgaggtctgccgcccggtgctggtccaggtcctggaacacgactacgatccctggggcagcctgtacaacgacgtggaccttgccaccggcgagcacaccgccagccatgtctggtgggcgcaggccgagagcgtgaccgccatgctgtacggctatgaactgaccggggaacaacgattcctggacgcctgcgaaaaacaggccgactacattgaaaaatactttgtcaaccgggagcatggcgactggtacaacaacatcatcgtcgatgacaacggctgccgcgttgtggacggcatgcacggttttgacaagctcaacggcggcaagtgtccgttccataactcgcagatgtgctttgaggtgatggaacgcaccgcacgcctgtgcaaggaggacgctgcccaatgaaagacatttacctgatcaccgcctcctttgccggggagatcaagcgcgatttccgcggctatgtggacatggcggccaaggccggctacaccggtctggaactgttcaactgcatttacggcggcatggaagcccgggaactcaagacctatctggccgaccgcggcctgtcggtcatcagcgcccatgtcaatgtggaggataccgacagtcagctgcgctatctgcccgagaccggctgccgctatatcgtctgccccatgctgcgcgtggccgaccgggacgatgcctaccgcaaagccgagctgctcaatgacctgggccgccgggccaaggctgccgggctgcgctacggctaccacaaccatgacaatgacttcgatgtctacgacggcaagcgggtcatcgacattttcatggagaacaccgaccccgatctggtcacctttgagctggacgccgcctgggcctggcgggccggcgtggacgccgcccaattcgtgcgcgaccatgccgggcgcatcgagctggtccatgtcaaggagacctcccgcgtgctgggtcccgaggacgatctgcgctctctgtttgccggcgtcaagcgtgacgccgaaggccgccccatcttcacgcccgaacagcaggccatcttccgggagcgccagaagatcaactgcaagctgggcgacggcatcatcaacatgccggaactgaaaaaggccgccgatgcccagggggtccaggcttacattgttgagcgggaatacgcctacaccggcgacaactacaccaccattctcgaagaccgcaagtacctcagtgccctgtaacacaaggaggacaccacaatgaaaatgtttatcaacggccagtgggtcgacgcttcggacaagggcgtcgcccaggtcatcaatcccgccaccggtcagtgtgtggacacggtccccgaagccaccgaggaggacattgacaatgccattgccctggccgtggaaggacagaaagaatggaacgccgttcccctgcacgaaaagatggccattcttgagcgttactgcgtcctgctggagcaggacaccgaaaagatcgccgccatcatgtgcgaggaaggcggcaaacccatcgagcagtgccgcaccgaagtggcggccaacgccgccatcttccgcatctactgcgcggcggcctacaccttctacggcaagacgctgccctacaacgccgagccccgttcccagggcgatgtagcctttaccatccatgaacctctcggcgtttttgccaacatcgtccccttcaactatcctgtggagctggcggcgcacaagctggctcccatgctggtcaccggcaacagcgtcgtgctgatgccctccagccgcacgccccgcagcgctctgctgctggtggaactgctggtccgcgccggcgtccccgccaaggccgtctgctgcgtgaccggcgcgggcagccgcatcggcgcccgggccgctgccgacccccgcgtggcggcggtcagctttaccggcagcacccgcgtgggcatcggtctggcctgcacctgcgccaagtccctgcgccccgtctccctggaactgggcggcaacgatgccctcatcatctttgacgactgcgactacgagctcgccctcaacgaggtcgtctccggccgtatcggcaacgccggccagacttgctgcgccagcaaacgcttcctggttcagaagggcatttattcccgctttgtgcaggatctggccgaccgcctgagcaagatcaaaatgggcgatcccagcgaccccaccgtcgagcttggtccctgcgtccgggaggatgcagccaagaccgtggaagatcagatccgcaccaccattgaacagggcggcaaactggtctgcggcggcgtgcgcagcggcgctttcgtcacccccaccgtgctggaagtcacccccgacaccgacattgcccgggatatggaggtctttggcccggtattccctgtcatctgctttgataccccggaggacgctctgcgcattgccaatgcgtccacctacggcctttcctccggcgtcatcacttctgacatgcacaccgccatgaaggtcgccaacggcatcgaggccggcgcctgcatcatcaacggcagcggcaactaccgcctggcccatcagcccttcggcggctacaagctgtccggcgtaggccgcgagggcgctgtctccacactggaagagatgacccagcagaaactgatctccttcaagggcatcctgaactgacaccccttatctttgaaccggaaaggaatgaccaccatgaaagacggaaaacttcagatcggcattatcggctgcggcggcattgccaacggcaaacatatgcccgccctttccaagctgggcgacctgtgcaccatggccgctttctgcgacatcattgaggagcgcgccctcaaggcccgcgccgagtacggcacccccgatgccgccgtctacaccgactacaagcagctgctggccgacgacagcatcgacgtcgtccatgtgctgacccccaacgtcctgcactgccccatcacggtggacgcctttgccgccggcaagcacgtcatgtgcgaaaagcccatggccagcaccagtgccgacgcccgcaaaatgctggacgcctggaaaaagagcggcaaacagttcaccatcggttaccagaaccgcttccgtcccgaggtccaggccctgcacaaggcctgcgtccagggcgagctgggcgagatctactttgccaaggcccacgccctgcgccgccgcgccgtgcccacctggggcgtgttccccaacaaggccctgcagggcggcggtccgctgatcgacatcggcacccatgccctggacatgaccctgtggatgatggacaactatgagccggtcagcgtctttggctcggtcttttacaagctgggccatctggaacaggccaccgagggcaatgccttcggtccctgggaccccaagacttacgaggtggaggattccgctttcggcatgatccgcatgaaggacggctccgccatccagctggaagcctcctgggcgctgaacgtccgggaatccaaggaagcctccaccaccctgtgcggcaccctggccggcgccgagatcaactccggcatgagctacaagcaggatgagctgatcatcaaccgtggccacaacggcgtgctgatggacgagcagatggcgccttccggcaacgtcgcctactttgagggcggcgtcggcgaccccggctatgaggaagccaaacagtggctgcacgccattctggacggcacccagcccctggtgcgccccgaacaggcctttgttgtcacgcagatcctggaagcgatctaccgttccggcgagaccggccgtgagatccgtctggacgaactggagggctgaccatgaaactgggcttcatcaccgccattctggaagagtacagctttgaacagatgatggactttgcctcccagtccggctttacctgtgtggaggttgcctgctggcccgccggcaaggcggagcggcggtatgccggtgtcagccacatcgacgttgaccgggtgctggaggacgaggaatacgcccgccacatccttacgtacagcgccgacaagggcgtggcgatctcgtcactggcattctaccccaacaccatggaccccgatcccgaaaagcgggcggccaatatcgcccacctcaaaaacgtcatccgcgccagcgcacggctgggcgtcaacatggtcagtaccttcatcgggcgggatcagaccctgcccgtggaggaaaatctggaactggtgcgccagctctggccggacatcatcgctctggccgaaagtctgggcgtacgcattgccattgaaaactgccccatgctgttcggccgtgaccagtggccgggcgggcagaacctgatgtgcacccccaaactctggcgggaggttttccgcatcctgcccagcaaaaacctgggtctcaactacgacccgtcccactttgtctggcagatgatggactacatcgccccgctgtatgagttccgggacaaggtctttcacgtccatttcaaggacatcaagctctaccccgaccgtctggccgacgcaggcgtgcttgcctatcccctggactacatgcagcccaagatccccggtctgggcgacgtgaactggagccgctttgtctcggccctgaccgacatcggctacgacggctatacctgcctggagatcgaggaccgcgcctttgaaggcagcgacgaaaagatccgcacctcgctgcttctgagcaagcgttatatggaacaatttgtcatgtaagggggcctgcttctcatgtacgagaacaattttactgtgctggaagaggtcgtgcgggaaaaaagcgtgatccggcacgtttccaaacaccgcaagcccgacggtacgctggacattgagggcaacaaaaaaatctggaacgacgccattgcccggtttgaccagatccttctgtgggaggaccaggcccccggttatgatgaccgcgacccgctgcagccgccgccctccatgatctttgtgcctgcgcagggctgcagcgctccccgggggaccgtcatcgtggcccacggcggcggttttgagagccgcaccggctgcgagggcatgaacgtggcccattattttgccaaagcaggcttcaacaccgccatcctgacctaccggctgcggccctattcccgccgggatgccatgcaggacatgcagcgggccatccgcatcctgcgctgccgcgccgacgagctcaacatcacggacaagatcgccgtcatgggcttttccgccggcggcatgctgagcggcaactgcgccacccattacgacgccggcgatcccaacgccgccgacgccgccgagcgcttttcctgccggcccgacgccgcggtggtatgctacggagcctttgcaacggtggctttcccggggggcttcatgaacaatcccttccgggatgagaaccgcgccgaaaagctctacctggcccccgagaaaaacctgacccccgatacgcctcccttcttcatctggcagaccaacagcgacgacccgcgcaactcctttgtgctggccaccgccctgaccgaggcaggcatcccctttgagctgcactgcttccccgacggtgtgcacggtctggcccttgccgacggaaacaacgacctggatctcgaccttccccatgtagcccgctgggcgtccctgtgcgccgagtggctgcgtgcccaggggatctgatcccggcaaaaaacctccccgcagaaactgcttccgcggggaggttttttattttgcttgtttcacatccgcaggccgctctcggcgtcaaagatgtggaagtatttcggctgcatccgcacatggacctgtgcctggcgcatcagccgcgacggcggttccgaggagggcgccaccagggtcagcggcgtatcccccgtgctgaggtggaccacgacctctttgcccgcaggttcggcatagtccacccgggcgggcaggccgtcttcttccagccgcatatggaccgggcgcacgcccaggcgcaccgctctgccatcatccccggaggaaagccgcccgctctgctgggtggacagcggccagctgcctcccagcgccgagacggaccatccgtccgcctgccgggtcagggtgccgtccaccaggttcatgggcgggactcccacaaaaacccccacatattcattggcgggacggttgtacagctctttgggggcggcatcctgctcgatcatgccgtggcgcatcaccacgatgcgggtacccagcatgaaggcttcggcctggtcgtgggtgacatagataaaggtggtgcccagcttttcatggatctgtttgatctcctgccgcagctgtccgcggagcccggcgtccagattgctgaagggctcatccagcaggaacagtttgggtttccgcaccagggcacggccaatggccacccgctgctgctgtccgcccgaaagcgcccgggggcggcggtcacgcagctcccacaggcccagcagttccgcgatctccttcactctctcatagatctcatgccggggcatatgctgatttttcagggtgtaggcaatgttgtcatacaccgtcaggtgaggatagagggcatagttctggaagatcattgcaatatcccgctcatccgggcgcacgccctccagatcctggccgtccagcagaacacggccgtccgagacggattccagtcctgcgatcatgcgcagcaccgaacttttgccgcagccggaaggtcccagcagcacgacaaattccccgtgctcaatggtaaggttgaattgctgcaccgcgattacaccctcgttggtggtgtacggagccatttcctcggcgtcgtattttggctgttccctgcggggggcaaaccagcctttgggtgcaaaggggtaaattttgacgagattttccagtacaagttctgccatcgttcttccctgcctattctgcctcttcttccatacgggccgcctgttccagcgccgagaattcctccgccggcacggtgtccggccggggagcgggttcgtccggtgtttcggcctcggacaaaccgttcagcgtcataaattttgcaagggccttctccacgccggggctgatgaggtcggtgtacaaagcggggaccaccatcagcaggaggggataaaactccaccgccagcaccatcaccgccagcaggccgcacatcacaaagacgcttaggaaattgcgcgacggcagataaaaggcgatgcgcaggatggtgcccacgccgccccggaaccgggccagcgctgccggcatatataccaccgttgccacccacaccagcgacaggacgcagcccaccgcaaaataggccagataaaaggcatttttgtccatcagctgccggccgaagtccacgcaggtgtacagcagcaggctgaccgccacgacgatcaccgacagcagcacgccggggttgagggcgtcccggaaggcggaaaagtattcccgggtaacgccctccccgtcgcggcggatgacccgtgtgaccgtgtgatacagcgccgcgcaggcgggcaggatggtgaccaccgggatacaggtcagcagccagtaaaaactgaccatcatgaatccgccgatcttggtcaacatgcggatcaggggattttccatctgaaacatatgcgttccctcctgcctttttgggccgccgtgtgcggctacggcaaggcacacagacctcttttttcgggcctgtgtgccgttttttctgttgttatgctttcacgctagcccggataatgtccggctttccgtctctgcggaaggcgttgttgtcgctgtcctcaatgaccacggtatcgccgtcaaaacggaacaccagctttttggtcatgcaggtctcggcccagcgcagggtggccgtaaaggcatccggttccgtccacgcgccgtcgcagaccagcagctgggtggcgtccgagggcttgcccaccagattggtaaagcggcagccgttggtggtgatgcggatcgcctgcttgccggcggggccggaagtattccacacgcagccgtagtcgtcaaaggtaaaggagaattcctccacggcgttgaccggcgcgccggacatgaagttgaaaatctcggtgctgaggacgccgctctccacctgataggttttcccgctgattttggccgccgtctcgctgaagggtgcgtagacggggttgggcaggttgagggtgcgcatccggcgggccaggcggtcggcgctgtcgggatcaggctcaagatcctcgtttttgatcttttccaggaagtcccaggtgatgttcagcgtgctctgggcccagtgggcgcccacggccgtctcgttgatggcgatcatcaggtcctgttcggggctgacgatggtgaactgtcccatggcgccgtcggcacggtagacgcccttcggcttgcacatccagatctggaagccataacccaggaagttgtcgctggcctcggggttgttgagggactcggtggcggaatcgttctgcttggtggtggccaggcggacgtattcttccgacaggatgcgctcgccctcccagacgccgccgtccgcgtagagcttcatcaggcggaggttgtcctcggtggtggccagcataccgccgccgcccatctccatgccgtcgggcatgcagtaccagcggatattgtcggggttgatgccgatcttgttgaacagccgtttggtcaggtattcgtgcaggccctcgccggtcttttgccgcacgatggcgccgagaatggaggaaccggtggaattgtacatgaacgccgtgccgggtttgtgattgaccggcgtgtgcatgaagtcacggatccagtccacgctggggcggggcatggtgtccatgccgcagcccatgcacagcacgtcgcggacggtcagcagcttgaggttttcgctgggattctcgggggattcgtcgggaaaaatatcgatcagccgctcgtccaggctcaggatgccctcggtgcaggcaatgcccaccgcggtggccgcgtaggtcttggtgtgggactgcaggccgtggcgcaggttggggccgaagggctgccaccagccttccgcacagatcttgccgtggcgcatgatcatcaggccgtgcatctcggtgttggagtgttccagcgcgtcgatatagtccaggatggcctggctgtggatgcccacagcctcgggagtggttctttcaaattcttttctcatgataaatcctcactttctgtcagcctttaacgccgccgatgaccatgcccttgaccagctgtttctggaccaggggataaaccagcagaatgggaatgatggcgatgatggcaatggccatgcgcgcgctttccgtcggcagggatttcagcgccagggcagcggattcgaccatattgttgctggatttcaggtaggcgatgttgtccatcagtcgtttcaggtagacctgaatggtatacaggttggagtccgaaatgtagtacagaccgtttgtccagttgttccagtaggcgatggctgcaaacaggccgatggtcgccagaaccggcttggacagcgggatgatgatgctggtatagatgcgcatgtcgctggcgccgtccataccggctgcctcgatgatggagtagggaatgttggcgttgtagtagttgcggaccatcaggacgttcatggcgctcatcaggccgccgggcaaaatcagcgcccagatggtgttcttgatgtggaagaaggaactccacacaatgtaggtggcggtcaggccgccgttgaacatgacggtgaagaacacgataaaggcgaagatgtttctctggcggaagtccttgcggctcagcgggtaggcgaacatggaggtcaggaccaggttgcccagggtgccggcaacggtggtgatgatggtcagcatgtagcagcggccgatggtcgcacgcttggcccacaggtaatcataggcggcaaaggagatctcctgcggccagaaacggtatccgtactgtcccagagaagtctcgctggagatggagaccgacagcatcagcacaaagggcacgatgcagaaaaccgccagcaggatcagcacgatcagggcaaaatagtggaatcctttttcgtcccggaactgcggtgcagaatgttttttttgtttgctcatcttttttcctccctcagaacagggcgttttcgctgtcgaccttgcggacgaaggcgttggacaggactaccagcaggaagccgagcaccgcctggaatacgctggccgccgacgacatgccgatattgttcagctccatcaacgctcggtaaacgtaggtatcgatggtctgtgtggtgcttgtcagcaggccctggttcagggtgacctggtagaacagaccgaaatcggagttgaagatcttaccgatggaaagcagcagcatcaggatgacgatgggtttgagcagcgggagggtgatgtggcggatctggtccagcttggtggcgccgtcgatcttggccgcctcatacagtcccttgtcaatgccgccgatgcttgccatgtagatgaccgagctttggcccgatacctgccagaagtgaacgatggtcaggatcaccggccagtactgggcctcggcgtaccagttgatgccgtcgccgcccaggatggtgcggttgatgtagccgttgttgttgctgaggaacgcatacacaatgaaggagaggataacggccgacaccatggaggggaagcaaatgatgggctggatcaccttggccgccatgcgggaggagatctccgccatcaggatggcgataaacaccgcgatgacggtgcccatggcgatccagacgatgttgtacagcagcgtgttgcggatcatgatccaggcgtccttggttttgaacaggaactcaaagttttccagtccgcaccaggggctctcaaaaacgcccaccgagaaattcatcttcttgaacgcaaagatgatgccgaacatcggcaggtagttgttgcagaacaggtagatcaggcccggcagcatcagcaggtaaagcggcgccagccgccggaagtccgctttgcgtttgttgcgtttcttttctttgagcaggttgtcgtatttcggatttccttttgcagggatcgtctttgcggtacttgacatattagcacgctccttaccttccgtatgatagtattctaccgtctgccgcagccccggacattaaaaaatgtattctccatttcccattttgtaacacccgtacaaggggccggtggcggctgattttccggcctttccgggaacttttcccgaaagaaaaatgcaggccctttcggacctgcattttcaaacacacttgcaaaacgaaccggattacttatattccgcgacccacgcgtccacctgtgcctgatagtccgcaaggatatcgttgaggccggcggcttccagcgctgcctggaattccgggagataggtttcggggtcaacatcgccgtacagcagggcgttgttgtactggttgtacacgttggagaccgccgcgacctgggtagagacattgtcggagctgggagtgaagccgaacaaaggcgcgacccatgcgctgttgttgagctcttccatgtagatcttgtcttcgctggaggtgttgccgtccatggggtacagcaggaactggttgccgaacgcgccgcaggaatacaggcaggtgtacggcacggaatccaggcccaggccctcggggtagacgatggaggtcttgtcctcgttccattcccaggaaacgccttccaggccgtagatgatggtgctcatgacgtactcatcggtccagatcaggttcaggacggtggctgcttcctcgggatgctcggaagtgtaggcgatgccgtaggtcagggtgttgctggtcagagaggagttgcccaggctgaccgccttgaaggtagcgccgtagctgttgttcatggtgaacatctgctcgatggtctcgatgctgtaagagtgacccatgacaacggccttgcttgcgccggaataggtcagagcgtcatggctgagggtctgagccgaaccttcgggatcgacgtagcccttctggcgccattcgtaagccttttccaccgtctttttgtaagctgcggtgtcaaacaggctgaccagctgggtgctgtcgcccaccgtggcaaagtaggtgccgacgatggcggtgtggtcctcctcgctgtacagctgcagcgaggtgttgtaggtgttgacggcgggatactcgtcggggtatttctctttgaactgagcaaagagggcgtccagatcgttgatgtcgttgatctgggtcatatcgaagtcggtaaagtagtcttcgttgtagatgtacttatagtccagagacaggcccttcttggcggggataccgtagaccgagccgttgacgatgccgcacagatcccagtcgccgatctcttccatggcgccggccagaacgttgtcaacgtaggggtccaggttgaccagatagccgttggtgactgccgtgttgatggggccggtgtaaatgatgtccagcacctcgccgccggccagacgcatgttcatgtcggtggtgtagtcggtgagggaggaacactgaatgtcaaccgcaatgttgtagcccagaccctgaatatactcggagatggcgttgctgacatcagccgccgcctccgcgctgggcaggttgttcatggtcggcatggtaatggtgaccgtggtcacgccttcgttgttgctgccggtctcggacgtccctgcagaagagctttggtcgctggaacaagctgtcacggatgccagcatcattgccgccagcgcgagcgagattacctttttcattgttttttcctcctaatcattttgcatctctctctgagcgcacctctatgatgccttttttccgcaaattttactttcgaaaatctggggggatttttcaaaaaaaagcgttccggatcacccctgcagttcctcttttgtttttgttcccgttttctattaaaaaactacatttcgttatttttttaatagctgctgcaccatggcaatggcattgtcaaggttctgggcgttggccgccacccccagcaggacatcctgaccgtagtagccgtcccggtgcagaaaggaatcctcccgcagccagatcccgctcaagatctgctcgccgtccgcattttcggtatagtacagatcgtcgctccaggcctgcaggacctcatcctccacaaaaaggctcaggtccacaaaggcatcctgcgccgcgtaggattcaaacaccggttcatccgccacaaaaacatccaggtccccgatgccgaacagggccgccaggacctgtaaggtctgtgcgtcgcccgcgtccgaatcgtcatagctcagcgtatagtttgcctcgatgtccacccgctttccggtcatgtccaccccggcttcttccagcaggggggcaaaggaatcggtctccaccgagttgttggcattgatgagcacagcgtaaaaagccacgtccgcgctgcgcgccgccatgaccgcgctgaccgcgaccagcgccgccaccacgaccacactcaggatgggcagcttgtaatagtcccagataaacgttgctttctgcttccggtccaggcgggcaagggtctgcttatccttcttcagttgcgtcagccatttcatcatcgatgtatccgtctccttttctgttgcgccagtccgccgggctcatgccgcactgcttgcgaaaaaccgtggagaaatacgagatgttttcaaatcccacgtcgttggcgatccggccgatggagaaattggtggaaagcagtctgcgcttggactcattgatgcgcagctgattgatatactcgcgcatgttcatgcccacttccgaccggaaacacttggacagatagttgggcgtgatgaaagcgatggccgcaatggtatcccggtcgatattttcccggtaatgttccgcaatatagcgcttgaccttgctgatgacattgtccgactccaccggtttttgcagctgtgcggtggcgtagtcgtacaagtgcgccgcaaaattgatcatgtcgaaaaccgagcgctcggcgtttgcatccagttcccggatcatctcatcctcaaacagggcgtgcgccgaaatggtgttgtcctgcaagtaggtgctgaacacgtggaccaggtcatggtgcagcagggcaatggcgcggtcgctgccgcttctgcgggtggagatcccgtttgcaatggaggagatctcccccatgtacccggccttgtcatggcgcttgatcaggtccagcgtctttgtctcgtccagggaaggctcgctgccctcctgcaccggcgcggccggttcccggaacagcgccacctgtccgctctgcaggcgcattttatggaatctgcgctgcatttccggccagacctggggcagctgatacagagagatagattcgccgatgaggcacaccggctccagggacagatgggtccggcagaccgagatcagatggttgcaccggcgcaccgcctcctgttccgtgggcttggcggcgcagggcagcatggtgatgatggtcagcggttcgctgatctccacgatggagtcggaaaaatcctgccgttccgccaccacttcctgcgccaggtaatgaaagctgtaggtgagcagttcccggttccagccgttctgcagcgccttggagaagtccgctcccaccaggatgcagcgcacatgattgtccgcgtccgcctccaggtgattgcggcggatggccgcttccaccttggacttttcctcaccgtacatgccgtcgcgcaggcgctggaggaaattgttgcgcagggtgtcccgctgcacacggttggccgcattttccgaaatgcgctttttggcacgcagcgtcgcgatcatctgcaaaagcgcttctttcagttcctggaggtcgatgggtttggtcaggtagttggtggcgccgtagcgcaccgcctcccgggcgtactcaaagctctcataacaggtcaggaaggcaaattcctgctgatagttgatcttgctgacatatttcagaacctcaatgccgttgcactggggcatgccgatgtcgcacaggatcagttccggcgcttcggcggcaatgatctccttggcggtaatgccgttgtaggcgcgcaggatcttggtgatgccaaattcatggtaatccaggctgttctgtataaaatcaatggtcgagatgtcatcgtcgcaaatcagcagtttcataccttatcctccggtatccagatttccacatgggctccgccggtctttgcattggacagacgcagcaggtcattgcgatggtacagcagccgaagcgtgcggctgatattggtcaggccgagatgatctttggggtcgggaagttcctcttcctgcggggcggagaacatggccaggacttcctcggaaaagcccttgccgttgtcctgcacgatcatgcgcaggccgctgaagtcgccctcctcatagtgttcgcactggaccaccagccacagggcgtcataaaggctcatggcatgcttgaacgagttttccaccgccgtgaacagcagcagatacggcactttggtgtcggccacctcgtcggcatagccgatataggcgtccacactgcccgggaacttgatcttctgcatttcaagatagctgcggatctgttcgatctcttccgacacgctgacccatttgctctgcatgttgagcatataccggacatactttgccagcgccgtcagatatcggcggatgtcctcgttgcggtcctggtaggtcatgttgctgatggtggtgatggcgttgagatagaaatggggccggatctgggcgcgcagtatcttgagctcgtcgctcttttcccgcagttccctgtcataggcttcgatccgcattttctgcagattgtccgccatgttgttgaaactctcaaacaatcgggcaaattcctggctggtcgctttcgcctcgatgcggtaatccgcgtcctcattgcccagacggttggtcgcctccaggatgacctcggtggggcgcacgatcatgtactggatcacccacatcagggccaggaacatcagcaggcagaaggcactggccgcccccagcagcagggggccgccgccgccctcgcccagaatttcctggtgcaccgcagtgtacatggtcacgccgcacttgtccagtgcgacccgggtgatgatgctgctttgttcggcggaaacatttccctccgcatccagcttcagaaccgccgcgtctccgccgccggatagaaaatggagtgcgccgtcgctgcggaggtaaacgccggggtcgtctcccagcagggtatagttttccaacagatcatagttggacacgctgctggccgttcccacgatatatttccccagcgagatgaccttgacaaaatacaggttcccgccgatttcccggaccatccactctttgttggaaagccccgcgctgacatcaaaatcggtgttgtaaaaatattccttgagctgtgttttgcccagattggtcaccgaactgttggcactgaacaggcggatggaactttcggtgtcccggaggaaaaagcattccgcgtcgtcgttgacccgcagcttgtccgagatcatgtccagacatgcctttttggccgagtactccatcatgggtgacccggatttcagttcggtgttgttgtacacggtgagaagcagttcatgcaggtgctcgtacagcgtatccagccgcacttccactgcgcttttccacagttccacggtgttgcggttctgctgccggatcgtgtcgcttacctgtacgtaatagctgatgttggtccacaccaaaaatccaaacattgcgaccaggatcacggcaaaaagtcccgcaactgtttttcgccacgatttcatttcttcaccatttacctattttaatttttgtctcgtttttgaattttttctgtgttttttctcattttttcttactgccgtttcattataatacttttttaatagacaaaaaagcttacaactttcaaaaaagttccattcagtttcaaaaaagtacacagagattttattgttctcccctgcatatttcgtcaaaaaaacagagtacaaaattgcaaaagactcattgatttccgaaagacggcgcagctatccctttggtagactaaaaagcgaaacattgttacatatcaaaatcatccgggcggcggcccgttcaagggggaaacggtatatgcgccacaaaatgacggagttcatccggggcaacgtcaaatactttatcgtcgcgccattcctgacggtggcggagagcagcgccgagctgctgctgccgcttttgatgggcaagatcgtgaacgacggtctcaacgccagcaacgccgactatgttctttacaccggcctgctgatggtggccatctctctgctgggactgacgttcggcgtgctcagcgcgcgggcttccgcccgtgcgtcccagggatacggctacaatctgcgcaaggccatgttccgccagatccagaccctgtcctttgccgacatcgattctttttccacgccgtcgctggtcaaccgctgcaccgtggacgtgcgccagatccaggacgccgtcatgcagatcatccgcatgctggtccgcgcgccgacgctgctcattgtgtccatgatcatctgcatcaatctgcacgcggggctgtccatcgtatactggctggccatcccggcactgctggccaccctgtttgtcatcatgcacatcacccggcccttcttcagcgccatgcgggaaaaggccgacaccctcaacgcctgcgttcaggaaaaccttattgccatccgggtggtaaagacctttgtccggtccgcctttgaaaaggaaaagttcaaaaacgccaacgacgatctgacccggacctccattgccgccagcgtgcgcatcgcgctgatgcatccctgcagcaccgccatcttcaacctggcggccattgcgctgtactggttcggcgggcttctggtgggcaacggagaacttttgtccggttccctgctgtcctatgtttcctatctgaacaacattctcttctcggtcatgatgttcaacatggtgctgacccgcctttcccgcaccaagccctgtttcaaccgctgtctcgagatcctcaattacaccagcagcatccgcagcgacgcgccggagaccgacgcgcctctgaaaggcgccatcgactttgaaaatgtttccttctcgtacagcggcgtggggtcccgtgccgccgccctggaggacatcagcctgagcatccgccccggcgagtttgtggctatcgtgggcaagaccggcgtgggcaagaccaccctggtcaacctgatcccccggttttatgaccccacccggggcgcggtcctgctggacggcaaggatctgcgcagctggaacctgaccgatctgcggcagcacctgggcatcgtgctgcaaaacaacgtgctgttctccggcaccgtccgggacaacctgcgctggggcgcgccccaggccaccgacgaggaactgctggaggcagccagggacgcgcaggcctatgattttatcagccagatgccggacggcctggacacggtcatcgaccagggcggcaccaacgtttccggcggtcagcggcagcggctctgcattgcccgcgccctgctcaaaaagccccgcatcctgattttggacgattccacctccgccctggactctctgaccgagcggcggatctttgagaccttctacaccaaataccgcagcaccacggtccttctggtggcacagcgcatttcctccgtccagaacgccgaccgtatcctggtgctagacgaccaccggatctgtgccatcggcacccattccgagctgctcaagacctgcagcgtttaccgcgcgatctacgattctcaacaggaaggagctgaaagcgatgccgggaagaggcggtaacatggcccgcggacgcgattatcgcaagccccgcaatgtccagggaacgctgatgcgcctgggcggctatctgtgtcggtatcctgtgattttctcccttgtgctgctgacgactgtggcacagtcgctgctggggctggcatcctcgtatctgctcaagcccatcatcgacgactgcatcgtccccaacattggcgccgccgcaccggactgggcgcccctgcgcaacacactgatccagctggccgttttgtatgcgctgacgctggcggcttcctacgggcagtcggctctgtccatgattttgtccgagcgctgcaccaacatcctgcgcggcagcctgtttgaaaagctgcaggacctgcccatctcctttttcgactcccacggtcacggcgagaccatgtcccgctttaccaatgacgcggacaacgtccagaccgccattgaacagagcatcacctcctttctgtccgccatgatcacctttgtgggaacggtctatctgatgatccagctcaacgccgggctgttcctgctcacggcggtgtttgtggcggcggcactgttcaccagccgcaccctcagcctgaaaagcaagatccgcttccgggcgcagcagcgggagctgggcgagctgaaccggtatgcggaggaactgatccagggcatccgcgtggtcaaggcgttcacctacgaggaccgcgccatggacgagtttgatgtccgcagcaaaaagttccgggatgccgccatctccgccaactccctgggtatgtccctcatgcccatcatcggccagatgctgggcatctgctacgccgtgaccaccgtcgtaggcgccttttacatcatccgcggcagcgaaagcggctccgccgcctttaccgtgggcagcctggcgctctatctgacctacaccaaacagctgcgcgcccccatcaacaacatcaccaaccagctggtcagcctgatgtccgcgctggccggcgccgagcgcatcttcgccgtgatggataacgaccccgaacccgatgaaggcaccgtccggctggaatcttccgacgggcagtaccgctgggtcctgtccgacggcgagagcatccctctgcagggtcatatcaccctgaacgacgtggagttccgctatacggaggacaagcccatcatccggggcatctcgatggaagccctgccggggcagaagatcgctctggtcggctccaccggcgcaggcaaaaccaccatcaccaacctgatgacccggttttatgacattcaggccggcaccatcgcctatgacggcatcaacatccgggacatccgcaagagcgacctgcggcacagcatggcggtggttttgcaggacacccacctgtttaccggcaccattctggaaaacatccgctatggtcgtctcgatgccaccgatgaggattgctacaacgcggcaaaagcggccaatgcctatgactttatccaggccatgccccagggcttccgcaccaggctgaccgccgacggcagcgggctgagccagggccagcgccagctgctgaacattgcccgggccatgctctcccgccggccggtgctgatcctggacgaggccacctcctccatcgacacccggaccgagcagctcatcgagcagggccttgaccgcctgatggaaggccgcacggtgctgatcattgcccaccgcctgtccaccatccgcaatgccgaccgcatcgccgtgatcgagagcggccgtatcctggaattcggcagccatcgcgaactgatggaactgcagggcaaatattacgaactctacacaggccagcgcctgctggactgagaaaggaaggccccatgtcaacactggagatcacctatcgttcccaatgccttacccggccggtcaccttccggctgatctggcccaacgacattcccgaggaatggacccgggacaatccctgctaccgccgtcccaccaagaccctgatccttttacacggatacaccgccggccgcaccgagtggcccgactgcagccccattgcccagctggccatgaaatacaacctggccgtagcctgccccgacggcggcatccgcttctacctggacggaaaagggtccggcgctgcctggggagaatttgtgggccgggaactgcctgactatctgcgccaaaacttcggtctggcggactgccgtgaaaacaccttcatcggcggcgaatccatgggcggtttcggcgctctgcacaccgcccttgcctggccggagacctttgacgcagccatcgccctctcctcggcactcattgtccggcaggtcgccaacatgacgcccgacgcgcccatccatgccacggcggattacgactactacgtcaccaccttcggcgagccgtcccgggtgctggagagcgacaacaatccggagacgcttgtccgccgcctgaaggcggggggcaaacgcctgccccgcctgttcatggcctgcggcaccgaggattttctgctggagcgcaaccgggaattccacgacttcctgctgagtgaggaggtccccgtctcctaccacgagtcccccggcgcacacaactttgagttctggaaccagtggatcgaacccgggctccagtgggcgcttgatgaataaaccattcccatccccttaaccaaacaccgcagcccgcgggcctctctctccggcctgcgggctgtggtgttgttgcggcaaacgcaaaaagtcccgccgccgggcaaggtcgtccggcggtggggcttttgtctgcctgggaggcgggtcattcggtatagatgctctttttggtctcgggatcgcggctgaaatgggagaagaagtcgaaaatctggcgcgccatttccggcgtgggccaatggggcatgttcatctcgcacatcaggcggacgcggggcacgccgtcctcgctcttcaggtcaccgatgtagttggtgatgccgtcagccacaacggtgcggcggcagtcgggggcgaggggcaggccgatgtttttctcctcggggctgaatccgtccccgtcacggacggccagcatttcgtcccaggtgatctccctggcatggttgaccctggcccagctgttgatgccatccagcagttccttggccgtgctgcgggtgccggtgcggtccttggcgccgtacaccgggaagcggtggccgtccaggttgccggagacggtgatgatgggcatataggtgtccatggcaatggcacggggaacgccgtcgaagggcggctgaggctcggggccgatggcctcgtccacatagccgttggagaccggcgcgccgcagggcgcgaccgccgcatacacatcggggcgcttgttgcccagataattggccatgtagccgccgtaggaaaagcccgccacatagatgcggctttcgtcaacgggatacagttgttttgcctgcgccaggatctcgtcgagaacgtcatccacctccacagagggcacgatgacgatccattcccggcgggcggcctcctgggggatgccccagccgtcaatgatgctgacggggttctggccgccgtgcagcatgatgacaacgggatatttcctgtccttgttcctgggatcgaaagcgctgaccggaacaaaggagttccagcgcttgaattcattctgcggggtggggcagtcgggccgccgccagcggtatcccgtctttgcctcgtactcggtccagctcatgggatcggtctggccgtgaaattctttgaccatgccgtgtttggcccagtaagccaccaccgccggggaatgatcgtcaaaatccatcagtaccggctccatcatttcggccagggcgtccagataaccgccgtctttcagcgcctgaagatcgacctccgggttgaaggtggtatacagatcgcgcacccggtcgatgcgcttgttgtccgtcatgacaaactgccggtcaagaaaggcttcatagtccataaattcacatcctcctcatgattttcttcatgataccgcacattgcagtcccttctccacaagaaaaaacaccgctgttttcgattttgtatcctgacccgcaatcccctacattattgaaaaaactgattcgttttgtgaaagaaagcgggcagcggaattgatatgatagcatcgaggaagccacggaaaccggtggcggctgatccggaaggagtgatccattatgagtgaaaatgtactgaaaacactgcaacaggcggctcttgactggcacgcgccggaacccggcgcagatatgccccacggtgacatgccgggggacaagatcgtcattacccctacccacgtggaaaaagccaacattattttccccctgcttttgcccatgctggagcgttccatcgctcaaagccctgcgcagcgcaccatcgtggcggtctgcggcgggtccggcgtaggcaagtcggagaccgcctccctgctggcctactacctgcagcagatcggggtgggctgctatgtcctgtccggcgacaactatccccaccgcatccccgcccagaacgacgccgagcggatgcgcatctaccgctgcggcggcatccggggacttttgaccgcgggctgttacggcaaagaacaggccgccgcactgcgcgagctgcagctggccgaaacggacgccgaccctgcccgggtggagcaatatccctggctggccgtttaccagcaggctgcgcgggatgccctttccgggtatctgggcagcgtgaacgagcaggattttgcccagctgaccgacattgccgcccggttcaaggccggcgcgccgtccatctggctcaagcggatgggccgcaccccggaagacctgtggtacgacgaggtagacatgaccggcgtttcggtgctgatcatcgagtggacccacggcaacagtgaaaagtatcagggtgtggatatccccatcctgctcaacagcacccccgaagagacccgccagcaccgccgggagcgcaaccgcgacggcaagacggacagcgctttcaccaccaccgtgctggaactggagcagaaaatgctggaggcccaggcttcccgcgcaaagatcattcttgccaaaaacggggacgttttgtcctatccggaataccgcgccctcatggcgggacagctgtaaggagggatttttatggaacatcgcgttcagaacatcggccccatgctcaacgcctaccccgacagcatcggcggccggctgggggacatcgtcgcttttctgcagcgtcccgagctgaaggacaccttcacctccttctacatcctgcccagcctgttcaacaccgatctcgaccgcgggttttcggtgatcgattacggcctcaaccagtgtcttgccaaaccggaggacctggacgccctggccgagctgggccttgacctcaagctggatttcatcctgaaccacgcctccgtcctgtcggagccgttccaggacattctgaaaaacggccgcgattccaagtacaaggacttttttattgactggaacgccttctgggagggtcacggcaccatgaccgaggagggatacctccagcccgacccggagcttatcaaggacatgttcttccgcaagcccggcctgcccatcctgatggtgcgcctgcccgatggtgaggaactgccctactggaacaccttctatcaggaagtcacctatccccatatccatgagcaggaccttgtgcgggattaccgcatccaatacggcgttgcggtgcagctggccgcggccgccaatgccgccgtggatgccggcacccgccccgcagacctggatctgggggaatggaactgctaccgcgaccaggtcatcgactgcctggaaagcaaacggcgttacctgggccagatggacctgaacatccggtctccgctggtgtgggagtattacgcccgcacgctggcctccctggcaggctacggcgccaagatcgtgcgtctggacgcctttgcctatgcccccaaggaagtgggggcccgcaacttcctgaacgagccggggacctgggatctgctggcacgggtggacgaccttgccaagccccacaacatcaccctgctgcccgagatccacgccagctacggcgaaaagacctaccgcaagatcgcggaaaagggctatatggtctacgactttttcctgcccggactggtcctgcacgccctggaaagccgggacggcagcctgcttgcccgctgggccaacgaacagctggagcagggcatcctgaccgtcaacatgctgggctgccacgacggcattcctttgctggacctgaaaggcctgctgccggatgaccagatccaggatctgatcgacaccgttgtggcacggggcggctatatcaagaacctccacggccagaaaaacgtctactatcagatcaacgccacctattacagcgccctgggcgaggacgaccgcaaaatgctgcttgcccgggctttgcagctgttcatgcccggcaagccccaggtctggtatctggatctgttcgccggcaaaaacgaccacgaggccgtgcgccgtgccgggcccggcggccacaaggagatcaaccgcaccaacctctcccccgccgatgtggaagccgccctgcagcggccggtggtggcagaccagctccagctgctccggatgcgcagccgctgcgcggcctttgccccggatgccgccatcaccgtgcaggccgacggttcccggctccatttcacctggaaagccggcggccagaccgccgtgctgcatgccgacctttccgacgcctccttcctggcggaggtcacgtcggataccggcgaggtgctgttccgcatggagcagtgatccgccggttcaccaaaaagcaaacaatgtcccgcagggtccttcctgcgggacattgttttgtctgtcgacctcaaaaacgggcaaaacaaaaggctgtacaggatgtacagccttttgtttttgcacaattcaggcagccgccgcttcggactcgacgcctttcacctttttgatccacttgccgcttctcagccggaacaccgcccaaaccgccttgacgatctggtcggaatacaggcagatggaaacccagaagggttccacatccagcaggataccggccacatagcccagcgggatggccagcagccacatggtggagctgtccgccagcagcaggaagcgggtgtctcccccgccgcgcagcacgcctttggtcagcaccgagttggtggcgcggaagatgatgataaagctcatggcgttcatcagctgatgggcaatggctttggtctcgtcggtaatgttgtaggagttgatgaccggggtgctgaggagctgaatgattaccgcggccacgcagccgatggctacgcccagcaaaagcagggtgttgctctgccgtttgaccttgtccatgcggtgctcgcccagcgtctggccgatcacgaagcagccggcaaaggccaggcccgtgatgaaaatggtgctgacgcgctggaccaccacggtgatggaattggccgccacgaactgggagccgatgcgtcccatgatcatggcaagcacgctgtcacccacgcccagcaagccgtcgctgagcatgaccggaacgctgacccgcaggaactccattgccatgtcgccgcatttgccgaagagcttgttcacacggtagccgatctttttgtccacgacaaagaagtatccgcagatgatgacgacctcgaccacgcgggcaatgaccgtacccagtgcagcgcccgcaatgcccatggccggcgcgccgaacttaccgaaaatgaagatgtagttggcgccgatgttgaccataaaggaggtgcacgacgcgatcagcgggatcatagccaggttggcgctgcgcaggatgttggtggtgacggtggacatggccatcaggatataggtgacagtcgaccactgcagataaatggtaccgccctcaatgaccggtgcttcctgtgaatagaagttcatgatctgcgtggggaagcagacgttcagcacggtaaacaccgtggccagcgcaacggtaaaacggaacgccaccgtgatggtcctgttcagcgcgtcaaagttccgggcgccccagtagcgggaggtcaaaaccgacgcgcccatgctgatgcccatgcaaaggtaggtgaacagggtgacgaactgcgtcgccagggaggatgcgctcagcgcggtctcgcccagcgtgcccagcatgatggtatccaccaggttgacgcccgttgtgatgacgctctgcatcgcaatgggcagggcgatcctgaaaagtctttgataaaattttttatccgtctcgatatatttcattctgtccttctccggtcctgcgattgcttctgtttactcggtatagatgctttcccccgtccgggtgtcccggctgaaatgggcaaagaaggcaaagatctgccgcgccatttccggcgtgggccagtgggggatattcatctccgccagaaggctgacccgcacgatgccgtcgcggctcttcaggtcgatgcggtggaaggtcacgccgtccgccacataggtcttgcggcagtcgggtgccgcgggcagacccacctctttttccgcccgggacacatccgtgcggtctttcagcgccatgacgtcctccacgcggatctcgggggcatcgttgacccgcgcccagcagttgatgccctccacgatgtcggcgggcttttccatgtgggacaggccgaaagccctgccggagaagttatacaccgggaaacggttgccgtcacattcgccgtagacattgatgatgggcatatggatctttttggccagcgcccggggcgtgccgtcaaagggcggcaggggttcacggtcgtcgtcaaagccttcaatgaaggcattgtccatggcagtgccgcagggggccaccgccgcaaagacttccggcagctggttgcccaggcggttggacgcccagccgccgtaggaaaatcccgtcgcatagacccggctctcatccaccggatagagggccttggccttttccagaatctccagaataaaggaatccagttccagggagggaatgatgacgatccattcccgtttggcggcttcctggacaaagccccagccttccaccaggaaaatgttgttgcaggcgccgtgcagcgcaaacactacgggatatttccggtccttgttagcggggtcaaaggccgacaccggcacaaaggaagtccagatcttgtgctcgttctgctggacccggtgttcctccgccttccagcggtagccggttttggcggcgtagtcatcccagtcgttgggctcatcgtagccgtggaactccttgaccatgccgcgcttggcccagtaggccatgacctcgggggagcgctcgtccggcacatccaggaccggctccatcatcttttccagcgcggggaaaaagtcggaatttttcaaggcctccagatccacgttggggctgaataccgtgtacagttcccggatggtgtcgatctttccgtcgtccgtcatctggtactttctgtccaggatcttgtctacatctgccatcgctgcaacactccttgcttgttgtcgcgccccgcgccctgcggagctttttaccatattattttccttttctatgctactgcttttcaccgtacagcggccattagttttgtaaccagtattttcacttttctgacccgcggccttttgctcccggcaccggcaaagaaaaagccgcctttccccgcagcggagaaaggcggcccggcatcaaaattcaaggtttaccgtgaaggggaaggccggcaggcccacgctgttgaacagccctgcctcgcagtagttttcctcatcgtagcgtatggtgatggttttcgccgcggcaaatccggggcattgcagccgcatgacgtccccttctgccgatacttccggcgtgacggcggcgccgtcggcctccgccttgagggaaacatggggcaccggcttccagaccagaccgtcctcggcaaaccggaaccgcagttccaccgtatcgccgttgcgccgggcatcggtcaggcgggggctgtccgccggcacatccatgtgatagacatatttttctgccagaagcgccagccgctcacccaccgggcgttttttgcgcacatggatgttgcgcgcatccccggcgtccataatgcaaacgttatggacctgttccagcgcatccatggccgcccgctgtttctggcggatctcggcatagtgcagcgccttgcccaggccttcatccaggggcgccagctccacctgcaaaaagggcagctgccggttccacagtttgcgccagctgttgatgagggtcttcatggactcgtcatagaattcatgccattcccgggcgtcgtcgtcctcgccctggtaccagatcacgccccgcaccgcgtaaggcgccacgcggcagaggatctgctcatacaaccccgccgggcgcacggccgccttggggccgggtacaaagggactgtacccctccggcggtttgggggtgaagttcttcatcagtgtttccgggtcgccgcccatcatgaaggcttcggtcatggccttctgttcctcggtgggctcaccggcaggcacaagggcgtcctgctcatacttgggccagtccagtttggcgcagatgtccgcctgccagtccagcacggttttcagtgcaggattggcctgcagatcctccatggccgtccaggccgccgccggggtgccgccccagttgcagcccacgaatcccaccggcacgcccagcgcctgccgcagcttgcggcccatatacgccgccggggcgctgaaaaagctgatattgtcggggccgtcccacacgcgccagaaaccgtcgtcggggaacacatcccgctccagatttcccaggaaacaggtctggggatagcggaaatagcgcagcccctcgtctttgggggtggctttcatttcctcggcgccctcgtcatatttgaggaggaattccatgttggactgtccgcccgccagccagacctcgccgatggccacattgccgaaccgcagtttttccccggtgagggcggattcaatggtcatttcggtctgctccgttgcgggcatggggggaaattccaccttccattcccccacagggcagccggtcttgcgttccatcccgttgagggtgacggtgatggtatcgttgcgcacactgcggccccacacggggatgggaagatcccgctgcaaaaccatgttgggggcaaacatcattgccggttgaagtttcatctgctccgttccctttctttatgttttgtgttacgactcaaaatccaccacctgatgcgtccgggcggaacggaacaccgcctccatcaggcgcatgacccgcttgacctggtccagcgtcacgatgggttcggcctgtccttcaatgaccgccatgacattgcggtagaaatcccggatgtccgcgcgtacctggggcagcggcttctcggcgatggtctcgggggtgcggggggccatggtcttggtcagacccgccgccgtgcgcaccggcacggcatctttcttgtcatggtccgtgacatagaccatgcggccctgttcgttccagttgcggatctcggcggtgccgtcctggcacaggacataccaccgcggcagggcaatgaagttgctggtgcccacttccaccacaaaaaccagtccgctttcaaaggtcagctcaacggtaaagccgtcctccaccagttcattggtcacattggtaaaggaagcgtagacccgcgagaccttttccgggatcatcatcagcgcctggtccagcaggtgcacgccccagtccaggaccatgccgccgccgcgctcgggcagctgccgccagtcccccggaatgccccgggacccttgcacgcggctctcgatgcggaacggcgtgcccagccagttcttctcatacaggtttttcacggcgaggaaatcctcgtcccagcgccggttctggtggacggtcagcagtttccccgtccgggcggccgtatcggccatatgctgcagctgggtgctgttgagcgccaccggtttttcgcacaccacgtttttgcctgcttccagcgcacggatcaccgtctcttcatggacgtcgttgggggtggagcaaaggacgatatccaccttggggtctgccagcagctcttccagagaggaatacggcctaagccccacctgacgggcataatcctggcgttcggggcggatgtcaaaactgccggccaggtgcagatgctcaatggcgccgcaggcgcggtcattccagttgccgtcaccgctgatcagttcccggtgccagttgcccatgccgcccaggcccacaatggcgcaataatgttcgctcatgcttatctctcctgtctgtctcttcttttggcatactaaaattttacgacaccggttttgagaattcctctaataatgttcctttccctttcggttttgtatgatgctttgtttttttgcagtaaggcaaagtgtttacaaaatcaaaagttttgtgcctgcctgtgaaagaaaaccgtccgcggtccgacgtatactgatactcaagaaaaaaccgctgccaactgcggcggcatggaaaggaaacccacagcatgaagcgagaccgcgcccttctggatgagattttgtttcccggtgccaaggcaaaagccttcaccacaagctacgatgacggcaccatccacgaccgccgcctgctggagatcatgaaccgccacggcatccgcggcaccttcaacctgagtgccgggttcctgggtctgcacagtgtgatccccggcgaacacggcccgctggacgtcagcaagctggacaccgatgcggtccccgccctgtatgccgggcacgagatcgccggccacggcctgtaccacgccagcccggtcaacatcggcctgccggcttttatgtatgagaccattgaggacaaggcccgtctggaaagcctgacccacaccctgatccggggctatgcctatcctttcggcctgtacgacaaggacaccaaacggcttctgcgcatggcgggctaccattacgcccgagtggtggagaccaccggcgggtttgacctgcccgtggactttatggaatggaaagccacctgccatcacaacgatccccgcctgatggaactggcggagagcttctgcagcggggcgggatttgccccgcggtgcaagctgttctacgtctggggccactcctatgaatttacgggggacgacaactgggaccgcatggagaacctctgtgcctacatgcaggaacacggcagtgatgtctggtttgcccccaacattgagatctgcgattatatcaccgccttccgcagcctggaatacggcgcggaagggtccctggtatacaaccccagcgccctgaccgtctggctgcgccgggggcagacggtgcataccatcccgccgctgtccaccgccgtgctggactgaacgcccgaccctgctctaaaggaggaatcttcatcgtgcaactgctcaacgtcccttccgccggggagctgatccgtccctacggccggaccttttttgacgagaccgacggcgttttgtacttcaactatacctgcggcggttttgaagttgatttttgcggcaccatgcttgcggcggtgttttccgctatgcccgaccggaccgtgccgccccggccgctgatgcccggtcagcagccccccaaacgggaggactggccgctgatctcggtatttctggacggcagcgacgtccccgcccggacgatgcgggtgcgcgacggggagaccgttccgctgtttttcaaccccgagaaggaacaccaccgcatccgcgtggtcaagctgacggaaaatctgcgcaccgccctgggactgcggggtctgtgggtagagggaacactcagccaccctgcctgcgctcccgcccccgtcattgagttcgtgggggattccatcacctgcggcttcggcaatgcgacctccgatgtgggccacgagttcgaggcctccgaggaaaatggctggatgtcccacgccgccattgccgcccgcatgctggggtttgaaagccgctttgtctccgtcagcggcatcagtgtggctgtccgccccggaatgcccggtatgtacggcatgctggacctgtacccttatgccgaccgcatcatccaggacaagctggcggaggcccgcggcctgcccgcaccggagtatctgccctacgattttgctgtgaaaccggcgcagtacgtggttttgaatctgggcaccaacgacgccagccaggtctattttgcccccgacgaggaaaaggcccagacattgaaggatttcgagagcaactacctccgccttgtgcagagcatccggtcgctcaacggtcccgacaccatcatcgtgtgtgccctgggctgcatggactactacctctatgacaacatccgggatgtgctggaccgctaccgcgccgataccggcgaccggcgcatttacctgctgaaataccacaagatgatgaacatggcccccgacgcgggcgcctgtatgcaccccaccatccaccgccatcagaagatggccgcccagcttgcccggtttatccgcggccttgggtgagggttttccttttgttttcttcccatctccatacaaaagcacacgcggctgcatttttgcggccgcgtgtgcttttgtatatcctttccttctttcttgacacctgtccccccgctattgtatgcttgcagcagaaccccataaaaaggagggacccccatggccactaccattctcattgccgaggacgacgccgatatccgggaggtgctgcgcctttacctggaaggggaaggctttgcggtggcggaggccgccgacggcgacacggcgctgcggctggccctttcctccgcccccgatgccgccatcctggatgtgatgatgccgggcatgaacggctatgaactgacccgggcgctgcggcggcagagcgacattcccatcctgatcctgtccgccaaaagcgaggacaacgacaaaatcctgggcctcaacctgggggcggacgattacattgccaagcccttcaaccccatggaggtggtggcccgggtcaaggcccatctgcgccgggcgggcaatgtccgccgggaccttttgacggtgggggagctgacgctggataccgccgccatgcagctgtacaaaaagggcgtgccggtccccctgacccccaccgagtacaagatccttgcccagctcatgcggtcgccgggacgcatctttaccaaggtgcagctgtacgagggcatcgccggggaattttttgagagcaatgacaacaccatgatggtgcatatctccaagctgcgggaaaagatcgaggacgatcccaagaatccgcggcacatcatcaccatccggggattggggtacaaaattgaaggataaaacgcccagagaaagccgcctgtttgcgctgctggtcaaaaactatctgctgttcaccctgacgctgctggtcattgcggcgggggtctatctgctgtgggaacaccagctcaaccggctgctgtcccccgtggactgggacaccctgatcgccgatgaacgcctggccgacggtcgttatgacgaggtcgcccgccatctggacggtgagggcaacggcttttcggtgctggacgaaacgggggcggtgctctactgttccgacccggaggtctgtgtcagcctgacccccggcgaactggcctgcgtctccccctacgacggcagctactatattgaggcatttcccgagcaggacgccgacggcgagacccgctaccgggtactgcgctacacgatggagggggacaggacccgggtccaggcggaaatgctgttggacgcccggttccgtgtaatctccggcgggctggagcctggccgcaccgcctacacgccccgggagtacggcatcctgagcggcgcctaccccgcccggtcggtgctctaccgccaggatttcatggcgcaggacggcagcctgcgcaccctgttattgcagatcgccctgcccgacgagcaggctgtcacccgggccagccaggatgcctggcgggtctggctgctggcggtgccgctgtatgtggcagcggcgggatttttcatccaccaaatcagccgccgcatccgccgtccgctggaccggctgcacaaggcggtggtggcccaggcccagggcacgcccgtccgggtgggagactgcggcggcgtgcgggaactggcccgcatcggcgagagctttgaccgactgtccgaccgtctggccgagagcgagcgggagcgggaacaactggaccaggaacggcagcagatgatcgccaacatctcccacgacttaaagacgccggtcaccgtcatatcgggctatgtggacgccctggccgacggcaaggtgccgccggaagagcaggcccggtatctggccgccatccgcagccggaccgacgccctgacccggctcatcaacgccttccacgagtacagcaaggtggagcatccccgctttgccctgcagcgccagaccaccgacctgtgcgagtacctgcgggaatacctggccgccaagtacgacgagatctccctggcaggctttgccctgcaggtggatatccccgagacgccctgcctttgcccgatagacggctttgagctgggccgcgccctggataacctcatcggaaacgccctgcgctacaaccggctgggcaccgtggtgtcggtctccctgaccgtggaggacacccgggccgtggtgaaagtggcggacaacggcgcaggcatccctgccgaccggctggacagcatctttgagccctttgtggtgggcagcgacgcccgcaaccagggaggcagcgggctgggactttccatcacccggcgcattgtggaactgcacgggggcagcatctccgccgcctccgacccccgcaccggcacggtgttcaccatccgcctgcccatggctgccgaataaacccaaagaccccggctgccggagaaacttcttccggcagccggggctttttgtgtattattcgctcttgatggcttccagggcagggatctgcaccgccttgttggcgggataatagcccgagcccaggccgatgagcaccgagaatgccacggcaaagaggtacagccagggcgggatgaccgacacccggttgaccgtctcactgcccacgatggcggggaggatgttgaataccgagaactctcccatggccaccaggttgacggtcaccgagatgaagaagctgatgacgcagcccaccagcccgcccagcaggccgatgaccccggcctcggtgaggaacatgacccggatgtcgtagacatagcagcccagggatttcatgacgccgatctccttggtccgctccgagatggacatgatcatggtgttggtgatgcccagcgccgccacgaacagcgagatggcgcccagtccgcccagcatcatctgtttttggcgggcttccttttccatgggtttgcggatgctctccatggactcggtggtgtagcccagggtcttgatggcgctttccgcctgctctacccgggaaatatccgtcaccttgaccaccagcgactcatagggcgggggctggcccgtgccgccccgggctttctgctggatggcccgcaggtcggcaatgctcatgagcagaccgtccgacgtctcgtagcccttggcggtgtcctcccggacagtgccggagggcttgaggggaaaagagagaacggtgccgttgtccagctcgatctccagggtcaggggctgggccaggggatcaaagtaggcgtcgggcgggggcaggagctggccttcctcgtcaaagccccccgcccagcggtcgatggtgttggagccttccggacgcagggtatcccggaacccgtaggcgaaatactgtcccaccgccacctcaccggaccgggcaggataactgccattttccagcttgtagcccagccgctccatctgggcggtgtccatgcctgcgatggtggcccagtcggcaacgtagcgcttgcccgaacctgccaccaggcggcaggtgtagccgtccagggacagtttgggggtgacggcctccaccccgtccatggcgcggatctggctgacgaggttgtcgtccagctttttcttgcccttgcctttctggggcgcggtgacggtgatgatggtcaggtcccccagctgggccagcagcttttcctgggattccttcatgccgatgcccagagacaccatgatgacgatggaacagcacccgatcagcacgcccagcacggtgagaaacgtccgggatttgcgccgcagcagattctggatgcagacgcgcagcaggtcctgatggttcatcctttacacctccgtgtcatcggtatcgtcggaaaatgcgctgtcccagttttcccagccggaagtctcggcgggctgttcctgggcggcggcccgctttttgcgcaccaccagcaccacgccggcgatgagcagcccggcggggatgaccagcagcaccggccaggggaaggagaagccctcctccccggcggcgtccaggtcggggtcaaagtccaggtcgggggcttcggataccgtcagctccaccgggaactccttggtctggggctgcaggttggggtcctcgtaggtaactttcagcaccagtttcagcttgcccgcctcattgggggtcagggcaaagcccaccgagccgctgctgccggcggagatattgcccacatactgggtcttggtcggggcgtcaaagccctcgcccacggcggtggcttccacattggagacttcggtcttgccccggttgacgtagttcagggtcagcaccagttcctcccccgcggtgcaggtctcgggtagggagggcgcgctaatctggaagcggtcctgctggaccaccggcaccgacagcttgatctccgacgtggcggcggcccgcttgttcccgtccacgtactcgtacttgaagagcaccgtcaccggttgggcaccgctcttggcggtgggcagggccatgagggggacgctctgccgctggtccgcccgggaacccaggctgtcatagtaaaaggtgctggtgccgccgtccagggcaaaattttccccgccgtccacgctgagcaccacgttctcaattttcaggcggcccatgttctgaaagcggaaatccagcttgaaatgcccgcccgccgagatgggctggtccccgtagctgaaatcctggatgaccacgttgggggtggcggcgtcggttttctggccgtcgccggtggtcgtggcggaaaggctgagcttttccgaagcggcgccctgggccagcgctccggcgctttcatagctgaatttcaggtcggcctggatggcctggctgccggaggtgatctccttggcggcctgcacccgcaccgtcaccgaggtgctggcgtccgggtccaggtcgggcagcaggaaggtggaggtctcgttgaggatggtcaggccgtcggaggtggagaaggtcaccaccggcgtgcggaccctggttttgcccgcgttgcggaaggtcacggcaatgtcggcggtctcgttggcggccaggggcttggcctgggccgaccgggtgatgagcaccaccggggcgggttcctccttgggggccggggtgggggtgggttccggcttgacgtagatctccgcctgggagacggtcacctcgatggtctggggggcttcggcgctgcctttgcgggcggcgctgagtttcaggctctggccgctgccgctgtactccacgccggggcaggtcaccttgacgctgaccgggtcgctgccggaggagaccacctccgccttgggggtgcaggcggaaaaactgtcgatgagcttgctgaaatcgtagtcctccaggcggaaagcatcggtggtcagggaggcgtccttgagcaccaccgcgatgtccgccttgtcgccccggcgcaggacggacaggccgctcccgctgcctggggcattgacggtaacgctggtggcaaaaaagttgagcgccgggacggcgggggcctccggttcggcggagacggcagccggggcggcgacgccgtcggcggaaaattcctccgccggggcgaggacggacaggatggtgcaggccagaagcagcgccagcagcaaggccgacgcgcgcttgaaaaagacaaactgggtgggcatgagggtcctcctttcaggaacgccgggtctcgtcgctgacgatctccccgtcgatgagccggacgatgcggtcggcataggcggccatctcggggtcgtgggtgacaaggatgatggtctgatggaacttgcgggagaaagcgcagatcatttccatgatctccaccgtggtcttggagtccaggttgccggtgggctcgtcggcaaagaccacgtccggccgggcgatgaaggcccgggcaatgcccgcccgctgctgctggccgccggacatctgccggggaaagtggtccagccggtgggacagccccacccggcagagcattttacgggcggcttcctcccgctccttgcggggcacgccccggaacatgaggggcagggccacattttcggtggcggtgagatgtggcagcaggttgtaggactggaacacaaaaccgatgtgccgctggcggaaggccgccagtttgttttcgtccagctgggataccggcaccccgccgatgcgcacgattccccgggtgggcttttccatgcccgccagctggttgagaaaggtgctcttgccggaaccggacgtgccgaagatgcagcagatctctccccgcatgatgttcaggtcgatgtttttcagggcgacgacggtctcgtcccccagggggtactctttccggatgccccgcacctcgatcagcgggcgttttctgggatacagttcctgcaatggggtcacctccttgatttgacaggtacagcataccgccaaaacctttgttctttctcaacgcatccttaagatttgctaaggttcggcgggtttttgctcatttgggcaaagaaaaacgacgaagcggcaggagcaaatgctcctgccgcttcgccggatgaaatttatttaagaagagaggatatcagacttctgccagcaaacaagcccccatcaggactttttgcggcggacggcggtgacggtgatccacgccgcgcacagcaccagcagcacaccgctgccgatgaccacgccgtacagcagctgctgccaccagggcatgctgggcacgatctcggtgcccacggcgatgccgttcatggcgttggagtttgcggtggcgtagcagacgcgcttggcagactcacgcatctgccaggccatggtggcgtagtcgccggtgccgtcgctgtcgggacggtaggcgtcgaactgaccctcgtggccgctgccgtcgggaatgtcgcagccgccggtgtagatgccgtaggccagctcaaagtagggagagttgtcctgtgcgccgttcatgtcggtgtacatgtcggtgacgatggcgcccttcatgccgcactcgccgcgcaggaagtcctgacccagggtgccgtcggaggggccggccatggtgcccagacgggcgaaggaagccatggtgccgtaggcgccgccctcggtgatgggcagctcaaaggcgcgcaggtagatctcgcgcagggcctgctcgctgatccagacggccacgccgtgacgggcggtctcctggtcgttgacgacgcagtgcttgttgtagacatggacgcccttttcctcaatgcccaggcattcggcagctgccatcatgccggtcagggtgccgcattcgctgtaatactcggcggtacggcccaggtaggggctgcggtggatgttggcgccgatgccgtacaggccggccatgccggaccagatgccgtcctcgccgatgatcttgccaacgcggtaggcgatgtcacggttgtaggtggcggcaatgatgccgttggccgggaaagcggtggtctttttggaaccgttggggtcggcgttctcgttcaggctgccgtcggcgttgacattgcccgcggcgacctcggtgcggtaggccaggccctctttctgggtgttgtaagtctggttgaagccgttggggccgttttcgtcactggtctcgggcttgcccacggagtccaccatggcggtcatgtggtagccgttggagaccagcttggcgatctcgttccaggacagctgatccatgaaagcgtcccactggggatcgtcgtagtccaggcccatcatgtcgatgagggtcaggtcggagtcgatctcatagttggggtaggcggtctcggcggtgtcggcggggatggcgatgccgtactccaccgggcactgcttcaggatgtcctgggccatctgctcggtggcggtcaggacgggacggccgttttcacggtcgagggagacggtgccggcccagtcggcgcggtcgtagtacttgacgctgttgtcgccgcggccttcgtaacggttgatgtcggcgtagtcaaacaggttggtgatctcgttgccggtggcgtcggagacggagtacttctccacatccaggtccagggtgaccttgtaggtcatggcagcgtcgccggtgcccaccatgcgggcggggtcagcgcccttggcggccaggacgttgttgacggcctggtgagagtcggacgcaacggtcaggtagtagtcgccgggcatgagcacgtaggtgcctgcgccgtagacgtcgtaggaggtgaagtacttttcatccacctcgatggtcagggtctcggtctggccgggagccaggatctgggtcttgccgaagttgaccagctccacggaaggaacctggatctggttctgcttggcgtagtcgccgtagggcttggagacgtagacctgcacgctctccttgccggagtactggctgccggtgttggtgacgtcgatggagacggtgtaggtgcggtcgtcggtcttggtgacgctcaggttggagtaggcaaaggtggtgtaggacagaccgtagccgaaggggaaggccacgaccttggagtagtcgtagtcacccacgttggccgcgcccaggacatagtcctcgtagcgggtctcggtgtagcggtagcccaggtacatgccttcctggtagacggtgtaggcgttcagggtgggctcgggaacgaacatgttgcccgccttgctggtgatgccgtaggtgtcggactccaggtactcctggtagccgtagttgacgttgacggggttcatgtcatggctcatccagaaggtatcggtggtcttgccggagggcacatactcgccggtgagcagcttgcccacggcggtggcgccgttctggcccagggtgcccacccacaggcaggcgtcgatgccgtactgctcgtcggtgatgaagtcggcggagagcatgctggcggagttgatgatcatgacgaccttcttaaagactccctgatccttgagggctttcaggcccttgagggtatccatttccttctgggtcaggtgcaggaagtcgccctcgtagccgtccacggtgctgtccatatccaggtcggagccttcgccgcccacacggccgatgatgtagatggccgcgtcgccgtagctggcaaaggtgtcacccgcagcggaggtgaccatatcccatggcacaccgccgatgtagatgccgccgctgccggcccagccggcggagtaacggcggaagtggatggagggatcgtaaggctcggcgccgttgcccatccagtcgccgccggagggagccacgtaccaggtctcgctgtagttctgcttcagggtggggttcagggtcaggccggcggcctcaaaggcagtgtagtagtccacagccttggaggtatccaccgagccggaaccggtgccgccgtagatggggtcggcgctggtgatgccgaacacgctcacgttgctgcctgcggcgatgggcagggcgttgttgtcgtttttgagcaggacggcgccctcggccatgacttcctcggtcattttggcgccggcgtcgatgagggacgccaggtcctcatactcggacttgaagtattcgctgtcctggctggcggcttcctcgctgaccacggtcttgaaggaggaagtgcccagggcgctgttgatggcgtccacgttctgcatggcgatgacgctgccggtgtaggagaagccgaacaccagcgtcagcgacacggcgcagatcttctgcaccagttgaagggtgtttttcttcatgggctcattcctccgtttccttgacctgtttcagaaagacgttgacgatgttgacgaccagcagggccgcgaacatgaacgtgcagaactggaactgccagttgaaggtggaagcctggatgcccaccatgacgatggacacatagaagtagatgccgtagatgtaaaacagcagaccgatgaaatctgccagagccagcactgcgcaggcccacttggccgccttggtgaagcacatggccagggcaacgaccgcgccgcccagcatgaagcccaccgcgggcatggccagatagcgggaaccgttgtacagcacggcgtagacaatggccgcgaccaccgtcaccacgatcagggccagggtgacgtaaaagccgtagctcttgtctttgaagagaccgttcttcatttctgttcctccttgattcttttgcgcgccgcaccgccccggaactcgccccgccgggcgggcttccctcctttccgccgggagggtgcggcgccgctctttcgtaaaaaacgtacaaaaaaattgcggtttcctcaacggaaaccgcatagttggtatgttttctatcacagttgacacattttttacacagaatactcacattccgccggtcagaccttctgcccggggtcaaagagcagcacatccagatagaacatgccgtccttctgcttgacggccagggacccgccgtacttggccgcggtacgctgcatactgcgcatgccgaaccccgcataggcgttgtcccgggggtcccggggcaggccgtttgccagctccaccacggcgggggcggggttctcgatatggatggcagccatgccgccctcctgccgggcggtcagggtgataaagcgctgcccctccggcattcggcctgctgcccggagggcattgtccagcgcatcccccaaaagactgtacagatccaggctatccacaaaggccagccccgcgccgtcggcgtaacaggtgagctggatcttgcggcggcggcactgttcccgcttttctcccagcaccacgtccaggacctcgctgccggtgtggaccacgtcctcgtaggtgctgatgctcttttccagggcatccacctggctggccgggaccttgccccggaagtcggtcagcagctgtttcaggtcgtggtacttttcattgatctgccatacccgctccttgctggcctggtactggctgtgctggcggtggacgatctcctgcatggcctccacccggccggccagcaaggcacggtccatgacgccgtactggacaatgagcagaaaggcatcgcacagcagccggtacaggtaaataccggtgctcagggtctggctgtggggctggccgtcccgggtcaggcgggtcagcccggcgcagagaagcagtaccaccaccgaaaaggcggacttgtatttgttgtcaaacccgtcctgcccgcttttggtgtaggggcggaagataaagtatcccgccagataaaacccgccgtagcacaaaaggtcaaagatcagtacgcccggggtggtggcggtgatgtccagaaacagggtggtgggcagctcaaagcgtaggatgaccttgacggcgctggccatgtcctgcagcacatagcccgacgccgtgacgaacagggcggtccaggccgattcctcatagcagaaccagacgatcaggctgagcagcacatacagcatggtgatgacggaaaactccgccaccagtccccgggcaaagaacagccgggtcaatagctccaccgccagcatgccgccgcccaggcccagggccagccggggcagaaaatgcctgcgtcgccgcagggaataactgaaggggaaaatgcccagaagtgcctgcaacagcagcagggcctgccagtgattttcataccagagaggcatcacggggtccctcctttatactgggccagggcctggagaaagtccttgcggcgggtgcgggtgacggtcaggctgtcctgccccacgatcacccggtctttctgcaccgcccgcacgtatttcagattgaccaggcagctggtgctgcaccgggcaaagtgcgtcccctgcagcagttcctcgtaatgggagagtgtcccccactgtttaatgacctcggtgccggtatggaggtaaacatcgtgggcctgcacctcgatgtagcggatgctgcctgccggaatgcgccgcagcacgccctcccgggtcttgatgtccaggatggggccgtccgatcgggcggccagcgcccgcagggcacggtccagcttggcagagaaggcaaagtattccaccggcttgaggatatagtcaaaggcctgcaccgagtagccctcgatggcatactgggccaggttggtcacaaagacgatcatgacccgggagtccttttcccggatgcgtcgggccgtctcgatgcccagctggtcgggcagacggatgtccagaaacatcaggtcggcatcgccccggtaggcgtccagcaggtcaaaggcctgggagtaggtctccagcacatagctgaactccccgtgctcctgccggtaccgggtcagatattccatcatgcgctgggtctgtgttcgatcgtcctccaggatacagatcttcatgcccttcctcctacaccttccgcaaaaatccccgcgccgcaatgcagagatttctataatatcacaatcatatcacatttaggacacgctgtcattgcaggagacaaaaagagaaaagcaaaaaattaattgcgttcgcaaatttataattgcgcgcgcaacctttttgtgttatagtaaatttattccttgaaatgatccgatctggagctttccggcgtaccatcaacgcaaagagcagcggattgtttttcgccaatcacaccgtagtccttttcaatcaggagaaaccatggaaaacgcacaacgtcaggccctttttgaaaccgtccccgttccccgcgccgttatggcgctagcagtccccaccatcctcagttctctggtgatggtcatttacaacctggccgatacttattttgtcggcatgctcaatgatcccatccagacctcggcggtcactctggccgcgccggtgctgctggccttcaacgccgtgaataacctgttcggcgtggggtcctccagcatgatgagccgtgccttgggccgcaaggattacgacactgtacaaaaaagttctgccttcgggttttactgcgccctcttttttggtttgtgcttttcggtgctgtatacggtattccgggtaccgttcctgtcgctcctgggcgccacggcagagacatccgctgccaccgacggatacctgttctggaccaccacctgcggcgcggctccagccatcctcaacgtggtcatggcctatctggtccgcgctgagggcagcgcccttcacgccagcatcggcaccatgagcggctgtcttttgaacattgtgctagaccccatctttatcctgccctggggcttcaacatgggcgcggcaggcgccggtcttgccacctttttgtccaactgcgtggcctgcttgtactttttcgtgctgctggccgtgcggcggggcaagacttatgtttgtgtaaagccttccgctttccggttgaaccgggagatcgtggtgggcgtctgcgcggtgggcatcccggcctccatccagaacctgcttaacgtcaccggcatgacggtccttaacaatttcaccgccagttatggcgccgatgccgtcgccgccatgggcatcgtgcaaaaagtcaacatggtccccatgtacatctcccttggcttgtcccagggtatcatgcccctgaacagttacaattttgcttcccgcaattattcccgtatgcggtcggtggtacgtttttcggccaccatcagcgtttccttcatggtgctgatctccatcttctaccatttttccgcagggagtctcatctcgttgttcattgacgatgccgagatcatcgcctacggcgcccgtttcctgtccggcatgagcctgggcctgcccttcctctgctttgacttcctcactgtgggcgtcaaccaggcctgcggcaccggcaaagtcgccctgatttttgccattctgcgcaagatcgtgctggagattcccgccctgtatgtgctcaacatgatttggccgctgtacggcctggcctatgcccagcccgtggccgaggtcattctggcagcggtatcgctggtggtcctgacccgcctgatgcgcagcctggacggctgatcttccctatgcgaaaagagacaggcccttcctcacggataagccgcagtcggtacatgccacggtcgccgtgagccaaacgcggaccgcaggccatgcgcaaggctgcccgtaagagataaaaaatgccgcaacatttgttgcggcattttttgatgcggaaagagactttggtgcacgttccggcagtccggcaagttcccgacaccggcagggaaaccgcccggacagatgtgctgttcttgtgcagcacccattcgacgggcaaaagcattgcgcttgttgcagaaaaaatgcttgccgttgacagtgggagtatcccggtgcagttgtaaagacacctgtgcggtgctatgatgaaattggtgaaaatcacttgcgaaatcgcgtaccccggcaacgggaaggagggtatgactatgacgtcccccaccgagcagacgttacaactgtggctggatgctttaagcggactgaacattcgcgtcaaaaaaatgtttggctgttattgtctctactgcgacgatcaagcagtgggatggattagcggagacaccctttctctgcgagaggtcggcttgtcgaacctgcccgcagatcttcgtcgtcctgcaccaacagacaagattcaggaaattcccatcccgctgaccgcttgcgggcaaagctggctgccccaggcagtacagcaaaccgctttgcgacgaaaatctcaacacaaaaaataaaccggaaaaaagcgccctgcttttcagcaaggcatttttttgtgcagacagcgggagcgtcaagaaaacgctcctgcggagcgtttttagcgacttccccgcgaggcgaatgcgagcgcctgcgcaatgcatgaagccaccccggaggggatggtgcgcagccccctttcccactaatcaggccacgcagggacccgcgcactttccaacagtcccccggactgttggaactggccgggacgctgaccggccggatgtgctgttctcgtccccgtctgcaccgggtttctcatttctgcaatgtcacataaaagaaaaatgccctgcttttcagcaaggcatttnnnnnnnnnnnnnnnnnnnnnnnnnnnnnnnnnnnnnnnnnnnnnnccggtccccgcgaggcgaatgcgagcgcctgcgcgatgcatgagcccgccccgaagaggatggcgcataaaaaaataccgcaacattcgttgcggtattttttggtgcaccatcggggactcgaacccaggacccactgattaagagtcagttgctctaccaactgagctaatggtgcatataagcaaacttcggaccgggcctaagctcggcccgaaggctgcttttcaagagaagccggcatctacctattttcacaggtcgtttccaaccaactatcgtcggcacaagtgagcttaacttctgtgttcggaatgggaacaggtgggacctcaccgtcatcgacaccggccggtatacaatctttcgatnaagagaagccggcatctacctattttcacaggtcgtttccaaccaactatcgtcggcacaagtgagcttaacttctgtgttcggaatgggaacaggtgggacctcaccgtcatcgacaccggccggtatacaatctttcgattgcatattctctttttagaaggcatgtgccctcaaaactgaataagaactgcatctggcaaatgaagcactagagaagattgggtcaagccctcgacctattagtacacactagctgaacggatcgctccgcttacactttgtgcctatcaaccttgtagtcttcaaggggtcttacctgattgactcagtgggatatcttatctcagggccggcttcacgcttagatgctttcagcgtttatccgatccgcacatagctgcccagctgtgccactggcgtgacaactggtgcaccagaggtgcgt

SEQ ID NO: 38 - DNA, 10583 bp, Gemmiger sp.
  source 1..10583: mol_type = genomic DNA
ttctcagacacaatcgcttgcgtcctgtcgaattacttgtttttggaattgtttatcgtgttctttccaaacacgttcaaggttccacaagtttcagtattgttcaattttcaaggtcctgtgccgaccgtttctcgcggacagcttatttattatatctcattgagttccgtttgtcaagaacttttttgaagatttttttgagctgtccggccgtctggccggcgctgttccgaaggctcgtcgccgtcgttacagcttatctattttacctcattcaaagcgctttgtcaagcacttttttgagattttctgtcgccctccgtcagatcctgtcgaagcagtccccaggcaactgagcctcctgcaatcaggagcaagtctcgttattcctgttttctgccctttcgcagggccctgtcggtcgcgacagcttgactataataccgcttcacaggccgaatgtcaatacctttttgacaaattttttctttattttttgtgcatcccttatatggtccacagccttgtatcttgccacaaaatataggtttgccacatgatctcccagggagcatctccggaatgcagccggttccgtgacagtgccgtaccgggccatccggatgaatggcggtctctatattatatatacattatatagtaacgaaatcgcccccccttccggaggtccccggccgctctcccccgggattctctgtgctgcccccataccggcaagcctttcccggcatctccgggtgtcggcggccttgcaatcccggcgttttcttttataatggtagtcacagcatctatttaggaggcccgccatgcttttggccatcaatatcggaaactccaacatcgtctgcggcggttacaccgacgacggcaaactgacattctgtgcccggctttactcggacagcgccctgagctcggatgagctgacctacaagatcgtgggcatgctggatctgtacggcgtgtctcccctggagatcaccgacgccattctgtccagcgtggtgcctgccctgacgccccgggtgcgggaggccatcggcaagctgagccaggcccccattatgacggtaggccccggcctgaaaagcggtgtgcgcatccgcatggacaacccggcccagctgggcggagagcttctgtgcgctgccgtgtcctccctgcgcaccaacaagccacccctgatcgtcatgacggtggataccgccgtgaccatgctggccattgacagcgccggcagcattgtgggcggcgccatcctgcccgcgccccagctggccctggccgctctggtgcgcaatacggcccagctgccccaggtggagctggaaagccgtcccaagggcgtcttaggttccaacaccgccgacagcctgcaaagcggcatcgtcaacggctccgccgccatgatcgagggcatggtcgcccgtttccgcaaggcgctggacgcccccgaggcccccgtcatcgccaccggctctttgccggacagcatccgggaggcctgcggcgttcccatcctctaccgggagacgctgatcctggacgggttgtacgccatctggcggcgcaatgtccgccgctgagccctcccccggcagcttttgcatttttttgcaaaaaaattcttgacaaaccatatacacggggctataataataaagctgattcgttcagcggttatctattgccccttagctcagtcggttagagcacctgactgttaatcagggtgtcctcggttcaagtccgagaggggcagccatcaagacggaagaacttcggttcttccgtctttttgttttgtcaggcgccctccccgccaggcattgttcccgtgcagagggcgctgctttctgcgccttttgtccgagccgtatcccgtcagcccggcaaagccgcgccggtttgcccttcatttttcacatttttgtccccgctgacattttcccgtgtatcgtacattttcgcgctttgaagcgtgaaacgcccggaccggaaggcatctttgccgttttcaactcttgacacgtgtacaatgcagcgctacaatagccccaatgatcgatcagccacaaagcggtggaaccccacggttccgccgcttttcttttgtccgtggctgtaccgtcccatttttgacactgtggtacgtgatattgatgaggggcggtccggcttttttgtgcactctccataaaagacagggggataaaagttccccctgttagacagtttccttttccgttatacttgagacaacggtaaagcaattatggaacgcagtaccgtcaaaaaaccggtactgcgacgaaaaagaaggcagggtgattccgtgaacaaaaagtcaggcggtctggcagaacggatcccgaccaaagtttggctgctgatctctctggcagtcgcactggtcgtctggacgatcctttctatcattccggtcacatccagaagtttccccaacgtcatcgtcaccatccagcagatcaaggtcatgtttgaccgcggcgtgctgctcaccgatatcggcagcagcttgatctcggtcggcgcaggctacgtcatcggcttcgtcatctcgctgccggtggccatcctcatggcatggtatgttcccttccgcaacatcctccagccgtggatctccttcatccgcaacattccccctctggcctacgttcccctgatcgttctgtccgccggcatcggtcgtcgtcctcagatcatcaccatcaccatcgcaacgttcctgatcatgtgcatcaccatctatcagggcgttatgaacatcgatgagaccctcatccgcgcggcccgcgtcctgggcgccaaagaccgcgacatcttcatccgcgtcattgctccggccagcctgcccttcatcatgacggctatccgcctgggcgcttccaccgctctgaccaccctgatcgccgccgaatccaccggcgccatggcaggtctgggcatgcgtatccgcacgctgaactccaacttcgacaccgaccccatgttgctgtacatcatcatcatcggcatcatcggcttgcttgttgaaaaagtgattgattttgcagaaaggaaactgacaggatggcaggagaaacgagaagcgtaaaggtcaagatcgacaacgtcaagatggtctttaacacccgcaagggcgaaatgaccgctctgaacggcgtcaacctggacattcacgaaaatgaattcatcaccgtcgtcggcccgtcgggctgcggcaaatctaccttgctgaacatcatcgccggcctgctgaagcccacctccggtgaggtcctctgcaacggcaagcccgtcgagggcgtcggccgtgagcgcggcgtcgtcttccagcagtacgcgctgttcccctggctgacggtcaaaaagaacgtctgctttgctctggaaatgcgcggtatcaaaggcgctgaggccgaaaaggaagccatgcgctacctgcagatggtcgacctggaaaagttcgccgaccattatcccaaggagctgtccggcggcatgaaacagcgcgtcgctatcgcccgcgcctacgctgccgagccggagatcctgctcatggacgagcctttcggcgcactggacgcacagacccgtacccagctgcagaccgatctgctgaacacctgggagaaaaagcaaaagacctgcttcttcatcacccacgacgtggaggaagcgatcattctgggccagcgctgcgtcatcatgagcgcccgtcccggccgcatcaagaagatcatcgacatcgacattccctacccccgcactcaggagacccgcatgagcccccgtttcaacgaactgaagaacgagatctggggcgaggtctacaaggagtatctggaagtccgcaaataatcccggtacgaacgggcgcccgccgggccccgcactgatacagaattggaggaaacaaacacatgaaaaaactgcttgcaaccctgacggctgcagccctggcgttcagcctggcagcctgcagctcccccagctccacctcgtccagcacttcttccaccacgccggacagcagctccgccaccaccgaaggtgccgaggcttccaccgagcaggagcccatcaccctgaacatcgcctacatgcccaactacgccagcctggtcgaggtcgttaccgccgagcagatgggctactttgaggaagagggcatcaccgtcaacctgaactccttcgccgacggtcccaccatcatcgccgccatggagaacggctccattgacatcggctacatcggttccggcgcccacaagctgtgcatcaacggccaggccaagatcttctgcttcgcccacgttggcaacggcgacgccgtcatggctctgtccgaccacggcatcaccaccgccgccgatctgaagggcaagaaggtcggttacgcttccggtacctccagcgaagccatcctgcagcagaccctggcccaggccggtctgaccatggatgacatcgacgcttacgagatggatgcttccggcatcgtcagcgccatgatctccggctctctggatgcctgcgctctgtggagccccagcaccctggccgttgaggaagaactgggcgacaacgtcgtggttctggccgacaacctgagcttctccgacacttccgcttccatctcctcctggatctgcatggccgactacgccgagaacaaccgcgacaacctgctgcgcttcacccgcgctctgtacaaagccaaggattaccgcgccgatcccgccaacgccgagcagatcagccagtggatcgcttccgagtgcgctctggattacgacaccgtttactcccagcgcggcgacgccgagtggctcaccagccaggaaatgatcgaccagatcaacgacggcaccattgagtcgctgtacaagtcccagcaggactctttcatcgccagcggcgatgtggccgcggaagttcctgtggaagactacgtcatgttcgacctgatgcttgaggctgccgaataaccaccgcggccccgcgcatcccagccaactgatacaaaagacggggcacaaggcagtatggtgccccgtcttttttcctcgtaacgaaacggcccgcacaccggcatgacaggcgcacccggcaggggtgtctctttcgcggaagattgtcatggaaagtcgtttttactataatcaaattaataaaaggacctgacctcagaccgtaaagagatggagtaaaaccatgccgttgatcgttgccgccggactgctggccgtatcggccgtcttttcgatcctcaagcgccagagaggatattttctgctgacggggttgtccgccagcctgttcgtctacctgctgtacatcctaatctacattgccaaaaaaggcggtatcggggaacagctgagctttgtgctgtacgtgacgccggggttcaggaccttcctgcaatacctgcagctgaccctgggccagctgggctacggtatggctatcggacgttttttgttcccctggctgttcctgctcaccgccctggaccagtccagcataaccaggtcctacagcctgatgaaattcgccatccccaccgcggtactgcccgtactttccctgatcctgtatcacccgtcggtctttctgaccgtcgcccccgacgagaccaggcagagcattgcggtcaacctgtccctgggctgggtctttctctatctgatcctgggctgtgtggtgcttctgcacggcatgcgcagcacccgcatccgctatatccgcaacctggaactggtggtgcgggtattgctcatcagcctggcggtgctgttcgccacctatgccccccaggaccccgcccaggtctacctgttctaccgggagacctacatgtcctccctgggattgtggtatctcaacccctatctgtccccctccatgtacctggccatcctgctggtgaacagcatctctctgctgctcagcatcttctccatgatgagcgtggccaaaatggagtggaccgagacccaggacgacatccgcctggaacgcaagtacgacatggcccgcaccggcggcggcgtctttatgcacggcatcaagaaccagctgctggccaaccgcattctctgccgccgtctgaacgacgccctggccgccgatacccccgacctggaccaggtacgccagtgcgcccggcagcttgccgacaacaccgacggcatgctttcccacgtgcaggagctgtataagagcctgaaatccaactccctgtccatgcggctgtgcagtttggatgacatcgtcagcggcgcggtgcagaacctgctcaaaaaataccccgccgccgcggcagaggctccgacgccctgcgggatgacggtgctggccgacccggtccatctgcagtcggcgctgaccaatctgctcatcaacggctgggaagccaccgtctccgccgggcgcagcgatccgctgcgggtggagatccacgaaaaaaacacctttatcgtcatcaccgtgcaggacagcggcaccggcatcagccggtatgacatgaaaaagatctttgagccgttctattccagtaaaagttccaactccaactggggcatgggcctttactatgtccgcaccatcgtcaagcggcatatggggtcgctcaaggtcgaaagcagctacggcaagggttcctgcttctacgtattcctgcccaagctgctccccaagcacaatgccggaaagagggaaatcaaatcatgagcatccgtatccttgtggtggatgacaacgatatcctgcgggaggatctgtgccagcagctggcgttgcagcccgacttcaccgtggcaggcagcgccgccaccggagccgaggccgtgcgcctggcgctggagaccgactgcgatgtgatccttatggacattgagatggaaagcatccgcgccggcatcgacgccgcgtcccagattcacccccagcgacccaagatccagatcatctacctgaccgcccacgacaacgacgacatgatcctcaccgccatggccaccggcgccgtggactactttgtcaagggcagcgattacgacgacctgtaccgtcacatccgtatggcctacgccggcacgcccatcatgagcgcccacacccaggaggtcatgctgcaggaatactcccgcctgcgccgcaacgagttcagtcttttgtacttcgtcaacacgctggcatccctgacccccaccgagcgcactctcatccgctatctgctccagggcctgaacgcccgccagatcagcgagatccgggtggtgggcatcgagaccgtcaagtcccagatccacagcatccgggaaaagttcggctgctcccgcaccaaggagatcgtggcctttatccggcagctgggtctcgagcatctgtttttgtaagaccgtatcttcacatatcacattttcaatcatcgaaaggagaaactcatcatggacaaggcatattatcatatttcggaagaaaaactgggcgagggcgccaaaatctccctggtcaaaatggcggactccgagaccgtgttccgcgccatggccgacatgatggccgactgcatcgtggaaaacaacgccgccggccgccgcaccgtctttatctgccccgtcggccccatcggtcagtatcccttctttgtggagcgggtcaacaaggagcgcatcagcctgaaaaacgtctggttcttcaacatggacgagtacctgaatgacgacggcacctatatcgacgaatccaatcccctgtccttccgcggcttcatggaccgggtggtctacaccaagatcgatcccgatctggtcatgcccccggagcagcgcgttttccccgaccccgctgaccccgcccgcggcgaccgcctgatcgaagagctgggcggcgtggacattgccttcggcggcatcggcatcaccggccacctggccttcaacgagccccagcccgagctgagctgtgaggagttcgccgctctgcccacccgcgtgctggacatccatgctgagacccgcgccaccaactcggtgggcgacctgggcggcgcgctggagtgcatgcccaagcgctgcgtcaccatcggcatgaagcagatcctgggtgccaagaagatccggctgggtgtcttccgtgactggcaccgcgccgttgtccgccgcgccgcttacggcgaccagaccgcggacttccccgccactttggcccagaaccatcccgacgcacagatcctcatcaacgacgtggccgccaagcagccctactgataggaggtccctaccatggacgcactgttcaaaaacgcgcgggtctaccgcaaccatacctttgagacggcggacgttctggtctgcggcggcaagatcgacggcatcggccccgatctcaacgcccccgccggctgcgaggtcgttgacctgtccggtctgaccctggtccccggcttcatcgatctgcacacccacggcggcaacggcatcgacgtcaacgccgccaccgccaaggagctggacgacatcggtgctttctttgccaaacacggcaccaccggctggcagtgcagcatcctcaccgacaccgaggagcagaccctctggtgcatcgagcaggccaaggccgccatggccgccccggccaccggcgccaagctgctgggcatccacctggaaggccccttcctggccaccgagtacaagggcgccatgccggaaaacctgctgcgcaagggcgacgccgaactgttccgccgttaccagaaagcggcggagggcgccatccggtacatcaccgtctcccccgaggtggagggcgtgcccgagatgatcgctgagatcgccgacgaggtcaccgtggccatcggccattccggcgccgactacgaggtggccatgcaggccatcgccaacggcgccaaggtctgcacccacaccttcaacgccatgggcctgttccaccagcaccgccccggcatgatgggcgccgccctggagaccgacatcttctgcgaggccatctgcgacggccgccacctgcatcccggttccgtccgcatgctgctcaagtgcaagggctgggacaaggtggtcgccatcaccgacagcatccaggccgcgggcctgcccgacggccactacaagctgggcgtcaatgacgtggtcgtggtggacggcgatgccaagctggccagcaacggcgtgcgcgccggcagcaccctgtcccaggacaccgccctgcgcaacatcatggcgttcaccggccatcccgccgaggatgtcattcctcttttgagcgaaaatcctgcccgcgctgtgggtctgtttgaccgcaaaggcagcatcgagaccggcaaggatgcagattttgtcgtgtttgacactgattggaacgttcgccgcacaattattggcggaatgacggtatttcagggttgacacacgtgtgtatttgacatacaatgaatgcaaaaagacaaaggaggaacccacatgctggtacccatgagagccattctggaagctgccgacaagtatcgctacggtcaggccgctttcaacatgaacagcgtcggccagatcgaggccgccatccgcatccatgagctgctgcgctccggcgcgatcctgcagggtgcagaggcgtccaacgcctacatgagcggcgagctggacttcatgcacggcactcccgagcagaaggccgtcggtgcaaaaaacatcggcgacaccgtcaagaagtatggcgccgacagccccatccccatcgccctgcatctggaccacggcaagacgctggagagcgtcaaggcctgcatcgacggcggatacacttccgtcatgatcgacggcagcagcctgtcctatgaggacaacgtggaactgacccgcgaagtcgtcaagtacgcccatccctacggcgtcaccgtcgagggcgagctgggcgtgctggccggcgtagaggaccacgtgttcagcgccacttccacctacaccaaccccatgcaggcggtggacttcttcaaaaagaccggctgcgacgccctggccatcagctacggcacctgccacggcgccaacaagggcaaggacaccaagattcgccgtgagatcgccatcgccaccaaggagtgcatgctccacgagggcgtgaacggcttcctggtcagccatggttcctccaccgtgccccaggagtacgtccagcagatcaacgccatgggcggccagctggagaacgccttcggcatcgacgtggcacagctcgtcgacgtggcccactgcggcatcaacaagatcaacgtggacaccgacatccgtctggcctgcacccgcaacatcatggagctgttccgtgaccatcccgagctgaaggacagcgcttccatcggccaggtctaccgcgacatggtggccaatcccaagaactttgacccccgcaactacaccgcttccatcatggacgccatcctctacggcaagatcgccgacgaggacgtggccaaggtggtcgagtgcatgaag

SEQ ID NO: 39 - DNA, 268996 bp, Alistipes shahii
  source 1..268996: mol_type = genomic DNA
taacttccaaatcagaaaaggtgggaataactccacggcgagatacattgccatgttcatttacacgatttcctgcaaatttcttgcagatgtcgttgatttttgtgaatttttcgatgaagttgtgcatacgacggtttgaactcaatagtttggatgctattaagttactaaaaaccagaaatatgcacaacctttcatttgtcattttactaactttttaattcaaccaacgggtaataaatagaggtcggatatatgaaaacagaagagataaaggagttgttcgagcagttcgaatctatcgccaatgagtatgaggggatcgaatgttggagtgcgcgagaactttgcgggcttctcggctattcgaagtgggaaaaattctacaatgtaatcgaaaaggcgcgggatgcgtgtgtaaacgcaggagagcatgtcgaggatcattttccccgcgtcgggaaaatgatcgaacttgccaaaggtgcgcagcgcgagattgatgattatatgctgacccgctatgcctgctacctgattgcgcagaacggcgatccccgcaagccgcagatcgcatttgcacaaaactatttcgctgtgcagacccgtagagcggagttggtgcagcagagaatcctcgattacgaacgggtgcaggctcgcgcgaagctggcagaaaccgaaaaacgactgtcaggcgtcctgtatgagcgcggcgtcgatagccggggttttgcgattatccggtcgaaaggggatagggctttgttccatcttgatacagcattggtaaagcgcaaactcggtgcacccgattcccgtccgctggccgactttctgccgacgatcggtatcaaagcgaaagattttgccgccgaaatgacctctgtaaatgccgagcagaagaatttgcacggacagatggcgatagaaaaggagcatgtcgataacaacgtcgccgtccgcaatatgcttttgagccggggtatcgtccccgaacagctccctgcgggcgaagatgtgaagaaagtcgaacgacggcttaaatcggaggaaaagacgctaatcaaggggaagaagaaatgagccgcagacgggtttacagcgacaatacgttggctattatggagcggtttttcacggcgttcgacattgccgtacagaatcggctgataaagagtatcgccgaatattgccgggataattcgatagctccgcctcatttctatacgcagcgtaaagaccgcaatcgtggctatttcgaggtcggatggctcgttccgctggttcgggattgcggcatatccgcgacatggctcctgaccggacggggcatgatgttccagcaatagaaaaaggcatcgaaaccgatgcctttcttcgttagaatatgtcgggtatcttggcgaccgctgcctgcttgttcttgtcgagcacctttgcgtaaatctgcgtggtcgatagctcccgatgtccgagtagcttgctgaccgtataaatatcggttccgaggtcgagcatcatcaccgcgaacgtgtggcggccgcaatggaaggttatatccttatggattccggcccgcaatacccaccttttgatcgtttcgttggtgcaactcggagagtggatgttggggaagatatgctcggcgtccttgccgcgctcgcccatgagttcggcggcctgcggcgggatgtcgagatattcctgtccgctggtcttcttctgtttgaagataatccgagtgaactctccctgctgatgcacatcgccccatgtcagacggatcacgtcggagcggcgcagtcccgtcaggcaggagaacaggaacgcccgcttgatggccggatattcgcattctgtttgagcgagccgctgcacctcttctatggtcaggtacatgcgtgttccctcttcggccttgaaaccctcgacgcccctcatggggttgataggtatgatgcgatcctcgtatgcttgattcaggcaggcccgcagtttattgaagtagctgacccgtgaattgcgagacagcggatgatccttgatgcgatcccgctcgtcgcagctccacgcgcacgcatctttctctaaatagtcccgaaatccctgcacccattcctgcgtgatctgcgagaacctgatccgctcgttcggctcgtatttttggaggtgtttcaggcatgatttccaattcccccaatttccggtactctccgctccgagccgccgggcgcacatcgcacggtagtagtcgaagaagagggtgtcggaggcgtatgccgacttgaagccatgctcgccgttctgcacctcgacgatgcgccgtgccttgatcgagttggcgagttggagggtttgccggttcgcctccctgtcggcttttgtcttttcgggaatgaggtacagtttcagaaattcgtattcccgctttccgttcaggtagatgtcgaggtagaggctgacgttcccgttcgtcagcttcttgcgcctgatccggatcggttctttgatctccgccatatccttttgcgttgaatgatttttgttacttctgttactcattttggccgagtaacagaatagcaacacaaaagtaacaaattatttgcatccgtacagcaaagagatgagaaaattttgtttggcagataaaactgtaaatagctttgttattgctgtttatatgccgatgatgtgctggcgaaatggcgttttggttaattggaaaaatgacgacctatttgccgatgcagaatttcgaaaagatgttttgcaggatttcgtcgggggcgatggcgccgcggcccgtgatggcgccgaggtgggtgatgacctggcggatttcttcgctcagaagatcggtcggaaggccgtgggcgagaccgtcgagggcttggccgagtgcttcgcgggccgccgaaagcgcttcgtaatggcggctgttcgagacgaccggatcaccgtggtagagcgcttcggtgtcgacggactcccgcagggcgtcgcacagggcgtcgataccctcgccgtgtttggcagaaatgccgacaacgccttcgggaagccgccatgcggccggagccttgtcggtcttgttgacgacggtcaggagtttctgcccgggacggagcggaaaatccggggcgggaaccggacccgtgagcgtcgaggcgtcgaccatatgaatgacgatccgcgcccgttcgatgctcgacatcgtgcgctggatgcccatttgttcgagccggtcgtcggtcgggcggatgccggccgtgtcgaggaaccggaaaagcacgccgccgatgttggcgcactcctcgatcacgtcgcgcgtggttccggcgatctccgagaccatggcccgctcctcgttcagaagtcggttgagcagcgtcgatttgccgacgttcggcgctccggcgatggccacggcgacgccctcccggatggcgttgcccagtgcgaacgaactgcgcaggcggtcgatctccgcagcgatgcgctgcatcgtcgcgcgcagcgccgtacggtcggcgaactccacatcctcctccgagaagtcgagttccagttccagcagcgaggtgaggttcagcagtttttcgcgcagcgattcgagctcttcggagtatccgccgcgcatctgcgtcgaggccagcgcgtgcgcggcgcgtgacgacgaggcgatcatgtcggccacggcctcggcctgcgagaggtcgagtttcccggccaggtaggcgcggatggtgaattcgcccggctgggccatgcgtcctcccgcggcaatcagcagccggaggatttccgagacgatgtaggaggagccgtggcacgagatttcgaccgagttttcgcccgtgtaggagtgcggggcgcggaaaacggccgccagcacgtcgtcgatcacgcggtcgccctcggctatcgtaccgtaatgtaccgtgtagccgtctgcctcggcgagcggccgccggccccggaatatccggtcgcagacggcgaaagcttcgccgccgctgatgcggatgacggcaatagcccctccggcggcggttgcagaggcgacgatggtatcgtgatcggtgttcattacctgccttcgatgcggagccgttgtccgatgcggagtttgtgggcgctcttgagcttgttccagcgcatgatctgcgccgtggtcacgcggtaacggcgggcgatggcccccagcgtgtcgccctttttgaccacgtagaccgatccgctgcgctcctggcgtttcttgtcgatgttggccgggttgatgtactccttgaggtacatcgagtctttggcttggatttcaggctcgtgagcgatgtattgcatgacataccgctgcggcaggaccagcgtgtagggcttggtcgtggccgggatgatgtcgagtttgtactgcggattgagctggcgcagggtctcgatcggcaggtcgatcgtcgaggagatctgccccaggtgcatcagtttgttgatccggacggtgtccaccgaaaggggaatcggggcttcggtcggctcgatgccgtgctggcggtggtaggcgtaggcgtacgacgcaccgatgaaggccggcacgtagccgcgcgtctcgcggggcaggtagtcgtaaatctcccagaagttcttgcctcccgagcgggcgatcgctttgttgacgttgcccgggccgcagttgtaggcggcgatggccagcgaccagtcgttataaatggcgaagaggtctttcaggtagcggcaggcggcctgcgtggcgcggtaggggtcgcggcgttcgtcgaccagcgagttgatttcgagtccgtagctcttgccggtcgtgggcatgaactgccacagcccgacggcgcccatcggcgacaccgccgtgggggagagcgccgattcgatgatcggcagcgcgcgcagctcgacgggaaggccttcgcggagcagctcctcctcgatgatcgggaagtagtactgcgacatgccgaggatgcggctgatcgtgccgtagcgcgagttggtgtagcggttgatgtagccctttacgatgctgttgtaggggaactggatcggcgacgcgaggtcgagcagccgccgggagtagaccgagtcgggcgtgctgtcggccacctcggtggagtcctccagaatgtactgtttgaaaaattcgctgaacgcgtcctgccgctggcgttcgcgccatgcggccagcagcgagtcggtctgttcgggggagaatcccagcgtcatgtcgttgacgacgggttcttcggccggggcgggttccggctcggggacgggaaccggttcggcctcgggaacgggcgccgggacgacggtttcggttttggctttcttgtcgcgtttcttcttgcgggggctgcggtcgagggccgacgccgaagcggcgacggcaaggagcagcgctatggtaaggagtttcttcatcgtctaaaatttcaggctcaaattgaagccgaacaccgggcggttacccccgagggtggggacgtaggtgtagtcgaccagcggttcgaggttcatcgagaggtcgtccgaaatgtcgtagtccttgaggtgggcgtcgacatgcgcatcgacgatctgcaggacgtacagcgcacccgagaggatgatgcagaggtcgcggttgcgccggtagttgttgcgcaggttgcggatgaacgaggccgaatagcgtccgtggaactcgtcggtcggcccgtcggggtatttgtcgggattgcggtcgtagtcgctcaacagattgtaggcctttttgaaacgttggtagccgcggttgttccagtcgatgcagtagatcatcgaggcgaatccgccgatgacgaaaggcactttccagtagcttttgttgtagatctgtcccgctccggggaagatgcaggccagcgtggtggccttcttgacgctcgacacgtcgttggtcgagtagctcacggccgcgtcgccgatgaagtagatgtacgaggcgatcgtgatccccaggtaaacctgacgccgcgtgttgctgcggatcatcttggactggagggcgtccagctcgggcgtgcgcgagaggttcacgtcggtataggattcgaactggcgcttgagcggcttgtaggtcttgttttcgtggatgtacagtcccagtccggttcccaccagtccgtagaggatcggcagtttccagtactgtttgttgtaaatctgtccgtagccggggaccacggtcgaaatccagcacaccttcgagagcgacatcgagtcgctcataaaccagccttttttgtagaccttgcgtttggtcgtggtgtccacgccccgctgtgcggcgtcgaagcgcgccagggccagcgagtcgaggtaatgcaggtcgtcggagcgcaggtccgcgacggccgccgagtcggcggcgtattcggcggcggcgatcgagtcgatctgccgtacgaggcccgccaggcgcagcgaatcgcgccggcccttgagcgaatccggtttttcgagcagtccgccgcggacgaccgtgcgtgcgccgcggtggagctgcgccccggcgggcagtcccagcgaaagggctgcgaccaggagcaggagtctgaaccggattgtcaccatatattttaattaggagcgtttagcaaaacgttcgatgaactgttcgatgtccctgtcgtccgtgaagccgatgacgattttgccgccgccgtttttcgcgcgtttgatcgaaatttcctgcgaaaagaacttttcgagctgctcgaccagtttcaggtagctttcgggatactcttcgtcctccacattctgtgcctctttgcccggggcttcggagagagagcggaccagctcctcgacctggcggaccgagaggcctttcttgatgcaccttttcagcacgcgcagctgctggtcggcgggcgccccggcgatggctttggcgtgtcccatcgagatcagcccctccttgagggcgagctgcacctcgtcggggagtttcagcaggcgcaggtagttcgacaccgacgaacgcttcttgcccaccttctccgacagggcgtcctgcgtgaggttgcactcgtcgatcaggcgctgcatgcccagcgcgatttcgatggcgttgaggtcctgccgctggatgttctccacgagggccatggcgtgcaggttctcgtcgtccacctcgcggatataggccgggagggtcttcaggtcggcccgctgcgcggcccgccagcggcgttcgccgctgatgatgacgtatttgcctccgtcgccctttttcaccgtcacgggctggatgacgcccagctggcggatcgagtcggccagttcgtccagagcctcctcgtcgaactgcgtgcgcggctgcgtggggttgggtatgatgtcggcgatttcgatttctgccatctgactcatcggtttgagcttggcatccacgggatcgctgccgaaaatggcgtcgagtccgcgtcctaatcccttctgtttcatatcggtattcgtttatttgctgcgtttgcggttgcgtttcagaaattcccgggccagggccaggtagttttccgagccgacggccccggcgtcgtagagcatcacgggttttccgtgcgagggcgcttctcccaaacggatattgcgctggattattgtgtcgtaggccagggggccgaagtgctcgcggacctcgctcaccacctggttgttcaggcggttgcgcatgtacatcgtcagcaggaagccctcgatgtcgaggccggggttcagtccgcccttgaccttgcggatggtgttgagcagtttggaaagcccttccagggcgaggtattcgcactgcacggggatcagcaccgtgtcggcggccgtgaggatgttgaccgtggtgtagcccagcgacggcgagcagtcgatgaagatgtagtcgaactttccgcgcaccgagtcgacgatgcgtttcatcacgtggtgggcgttttccatcttcggcagttcggtgtcggcggccaccaggtcgatcgacgagggcagcacccagaggtttttcacgtcgggactttggagaagcacttcgtcggcctgtttctgtccggcgatgcactcgtagatgccttcgaggttgatgtcgaagcccagccccgaggtggcgttcgcctgcggatcggcgtccagcaacaggactttcttgcccagcagggccagcgaagccgctaaattgatagctgtcgtggtcttgcccacgccgcctttctgattggccaatgcgattacctttgccatgtttgaattcggtttataagcaggcaaatttagtgaaattaaatggaaatccataaccgtagcggaaaaatgcttatctttacggtcggaatgaattgatagctatacgatactatggaagaaaaaaaatcgccggcttccgcggcggagtccgcagcttcgggacagccggccgcagtcccggcggcggagctgcgtccgggccgccggaaattcccgaccgtgggcgacctgttcgccatgctgggtatcgccttcggggcgcagatcgtcgtggggaccgcagcgatggtcttcctgcttttcgccgggcacgggcttgatttcaaatcgctggagccggctgcgctgggcaaggtgatggcggcgctctatttctgctcgatgtcgatcacgcttgccggcatcctctgctaccgccgcgcgcgcggcggtagcggtccgtgggcgcgtttctcggcccgggggctgaatcccgcgctgttgctgtgggccttcgtgctgatgttcgccgtcggcgtggtgctcgaaccgctgctgcggctgatgcccgaactgtcgctcgaagtgggccgcggattctggaccatcctctcgctggtgatcttcgctccgatcttcgaggagctgatctgccgcggcgtcgtgctggggtcgctgcgcggtaagttcggcgtgacgaccgcatggctcgtctcgtcgctcttcttcggcgtgctccacggccagcccgtgcaggtgatcaacgccacggtcatcggcctggtgctcggctacgtttacctggcgaccgattcgctgtggtcggtgatgatcctccatgcgctgaacaacgccgtggcctatctggcgctggccaccgggcacggcaatgcgctgctgatcgacctggtgggcagccggacgctttacgtgctgatttacatcgcggcgctggcgctctccgccgtgtcgggctatatgatgctgcgcacgctgcggcgcatgaaggaggcggagaaaaatccgtccgcggcgtaataatccggctccgcactgcgttacttacaagtaaaaaacgtatctttgcccttcggaatatgaatttgcgagcgaaaatagcggtcgcggcgggtgtgctgctgctggcgggttgccgggagctgccgcgttattttgccggcgacacgaccattgcgcgggccggcggcaaggacctgcggctgggcgacgtgcggtcggtggtcccgcaggggctttcgggcgacgacagcgcggcctttatgaaggtttacatcgaccgctgggtgctcaagcagctcaagctccaggaggcggagacgctcttttcctcttcggcgggcgacatcgacaagatggtggaggagtaccgccaggcgctgctgatccgccagctggaccagcattacgtcgaccgttcgatcgacacggtgttcaccgccgacgagatcgcggcctactacaacgcacacaaggccgatttcaaactcgaccgcacgatcgtcaaggggcgcatcgtccgtttcggcgaggggtaccggcaggccgcgaagctcaagacgctgatgggggccaggtcggaggcgcagcagcaggatttcagggacatctgcgagaagaacgatttcacggtggacgatttccgcgaccagtggattgatttcccggagtttttgagctacctcccgacgctgcgttcgcagagctacgattcggtgctggcgactgctgccgtgcaggagatgcgcgacagccatgcgcactattatttccagattgatgcggtgctgcgcgagggcgagccgattccgctcgaacggctgcgcggaacgatccgccgcatcctgttcaaccagcgcaagggcgagatcatccgcgcgcacgaggaggagctttgcgcccgggccgcggagatgggcgaggtgaagattttcgccgacgagaaaccgaagaaagacgaataaaaataaaacgataaacgaaaccaagatgttgaaaaaagctatgatggccgcggcgctcgccctgttgttcgcaggcgcccttgcgcagaaacgacaggtgatgctcgacaaggtggtggccgtggtgggcggatcgtcgatcctctactccgaggtggacgactatgcgcgccagctgacggaacagcgccgtcaggagggttacacttccgaccgcgacccgatgaacgaggcgctcgaagcgctgatgacccagaagctgctctacaaccaggcccagatcgactcggtgaaggtcaacgacgccgacatcatggcgcgcgtcgaggagcaggtgcagcagatggtcgaggccgaaggctcgatcccccagctcgaagccaagcaccacatgccgatcttcaacatccgcgagatcatgcgccagcgttacgaggagcaggcctatgccaactccatgcagaccgaggtggtcgacaaggtgtcggtgattccgggcgaggtggagcgtttctacaagtcgatctcgaaggacagcctgccgctcgtcgccgaccagtatgtctatgcgcagatcaccaagtttcccaagtcgatgaccgccgccaagcagcgtacgcgcgaacggctgatcgacatgcgcgaacgcgtgatcacgggcaaggccaagttcgaaaacctcgcccgcatgtattcgcaggaccccggcacgatgatgcgcggcggcgagatggacccctcgacgctcgaacagctcgaccccgcattcggcgcggcgctggagaagatgcgccccggccagatttccgaggtggtcgagtcgcagttcggcttccacatcatccagcttctggacaagcgcggccggctctatcatttccgccacatcctgctgcgtccggtctacacgaccgaggagctgggcggttcgctcaatacgctcgacagtctggtgaaggtgatccgcaaggattcgatcaccttcgagagggctgcgctgctctattcggacgacgcgcagtcgaagatgaacggcggcatcgtctcgaaccacgacatcctggagcgtttcaacgccttcgacgccaagctgaccgtcacgaaattcctcaaggaggacttcggccgtttcaagagcctcgatgattacaacgccctgaaccggctcaaacccggcgagatttcggaggcctacctcaccgaagacatgctcggcaaccagatggccaagatcgtcaagctggttgaggtgatccccacgcatacggcttcgctcaacgaggactacctgcggctcgaagagatggccttgcaggacaagcaggagcgggtcttcaaggagtggctttcgaagaagatcgacggcatgtacgtctacatctcgcccgaattccgcaacggggagttcgagaacaaacactgggtgaaataggccgtgcgcaggctcttgtccatagccgtagtggtgctggccgccgccgtggttgcggcgcgcagcggtatgcaggcgccggagccggagggcgagaaaaagctcatcgacctcaagtcggacctgatgggccccatcgccccgggcgattcggtggttttcctggtggggaacttcgccgcacagcacaacggcgccgtcatcacgtgcgactcggccgtgcgttactcggacatgcgcatcgagttcttcggcaacgtgctcatcaacaagaatacgacctacatttacggtgaccgggccgagtacgacggcgagctgaacgaggcgcgggtctactccgacatcgtcaaggtcgtcgacggcgacgccacgctctacacctataaattcctgttcaacacgaagaagaacatcggcgaattcgccgacggcggggtgatgctcaaccgcgagaacctgctcgaatcggtccgcggctactattatgccgacacgaaggagctgatcgccgtcgaccgcgtcgaaatgcgcaacgacgaatacgaactcaagggcgattcggtggtttacaacatggctaccgacaacgcctttttcttcgaccgcaccaacatctggaacaaggacggcgactacctctatgccgaccgcggttcctacgacaaggccgatacgctctacatcgtgacgcgcaacggctatatcctgactgaaaagcaggagatctggagcgacagcctccattactaccgcgccgaggaccatgtgatcctgcggcgtgatttgcagctggacgacgccgaacacaaggtgatcgccttcggcgactacggcgagtactggaaggagccgggaaatgcgttcctcacgcgccggcccgcggtggtgagttacgacctttcgcagggcgactcgcttttcatgcgcgccgattcgatgtacctcttcacgatcaatgaaaacgcactgcgccgggccgccgctgcggccaaagccgattcgctggcgcgtctgaaaaccgattccgcccttctcgggacgccgcaccacccggccggggagcttcccgaaggccgtcctgcggcggattcgctcggaagtccccgcgttccggccgtcggtcccggttcgccggaagacgccgcagggccggattcgctggcccggcgggaggtccccgattcgctgctgggcgtttccgtcccggattcgctggccgttccggccgtcgatccgctcgacacgctggtcggcgatgcccggaaagcctacctcaaggagcaggccgccaagttgaaggcggcccaaaaagccgctgccgccaaggcccggaaggaaaaactggaggagatcgccaaaaaacgccaggataagacgacggccaaactgctggcgcagaaggagcgggaggagcggcgcctcgctgcgcgcaaactcaaggccgagtcgaaactccgcgcccgtcaggcccgcgccgcccgcaaaggcaaggtgattccggtcgattccacggccctgcgcgagatcgactcgctgatcgcccgcaacgaccgggagatggattcgctgctgttgcagatggccgattcgctggccgccgactcgctggcgatgcggattccggccgactcggtcgattcgctcaccgactccgccgactcggtttaccgcctgatgaagggtttccgcaatgtgcgcattttccgttccgatttccaggccgtatgcgactcgatgacggccatcagcaccgattcgacgatccacctctacatcaatcccgtgctgtggaaccagggtaaccagatcacctccgacgtgatggacatattcaccgagaaccagcagatcacgcgcgccgagttcatcggcactccgatgatggtctcccagctcgacacggtccattacaaccaggtggcgggcaagcagatgacggcgtggttccgcgacaatcagatctaccgcaacgacgtgaacggcaatgcccagacgatctactacatgcaggacggcgagccgccccagatcacgggcatgggcgtcatcgagagcggcgactgttcgttctatatcgaggacaaacaggtcgtgacgatcgtctaccgcaaggaccccgactggaacatctatccgatggacaagattcccgccgatcaggagctttacctcaaggggttcaagtgggagggcgcgcggcgtccgacgcagggggcggttttcgaccgcagggtccggccctcgcagcgcgaggagaagaggcatctcgcacatccggatttcccgcttctgaaagccctcgaggagcgcaagaagcagctgatcgaggagcgccgctgggccgaccgcaacgatcaggtcgatgccgccaccgtggagtggatgcgggcgctgggcttcgaggtgggccagcctcgggagtcgggacccaagctctgaaaaattggaaaaaggtgaaaagatgcaaaaacttttcaccttttttgtgctatttttgcagccggttagccgttaatgtctgttttcccatgaagaaaagtctgatcgccctggcattcgggacgttggcgctcggtatggcggagttcgtgatgatgggcattctgcccgacatcgcccgcagcctcggcgtctcgatccccgaagcggggcacctgatctccgcctatgcgctgggcgtctgcttcggggcgcccctcacggtgctggtggcccgcacgcggccgctgaaacacatcctgctggccctcacgggcctgatcattctcggtaacgcctgtgcggcgctttcgccgaactactggaccctgctggccatgcgtttcgtctcggggcttccccacggggccttcttcggcgtggggtcgatcgtcgccgagcgcgtcgccgacaagggccggcgggccgaggccgtgtcgatcatggtcgtgggcatgaccgtcgccaacctcttcggcgtgccgctgggaacctatatcagcggcgtcgtgacgtggcgcgccacgttcgggatcgtcgccgtgtggggagccgtggccatgctgctcgtgaaattgtgggttccggctctgcccgcgctgcccgatacggggatgaaggggcagttccggtttctgaaaagcgccgctccgtggctggtgctggcgtcggtgatgctgggcaacggcggcatcttctgttggtacagctacgtcagcccgctgatggtccacacctcggggttccgttccgaggacctgacgctgatcgtcatgctggccggtttcggcatgtttgcgggcaatatcgtcggcggtcactatgccgaccggttcacgcccgagcgggttgtgcgcttcacgctcggcatggcctgtctggcgctcgtcggcatctttttcggggcgcatgtccgctatctttcgctagcgctgatgtgtctgactacggcctgcctcttctgcgtatcgtcgccccagcaactgctgatcctcgaaaattcgcgcggcggcgagatgctcggcgcggcgctcgtgcaggtggctttcaacctgggcaacgccctgggggcctacgtcggcggcctgccgatcgggcacgggcttggctatgaatatacggcgcttcccggcgcggctttcgtgctgctggggatgacggccgccatgatctacatccgtaaatatccccggcatgaacagcgataacagcgaagagatctttcccgtggtcgacgcggcggggaacgtcgtcggcaaagccacgcgcggcgagtgccacggcgggtcgatgctcctgcacccggtggtgcacctccatgttttcaattcgcgcggcgaactctatttgcagaaacgccccgcctggaaggacattcagcccggacggtgggacacggccgtgggcggccatgtggactacggcgagacgatcgccgaagccctgcggcgcgaggtgcgcgaggagctgggcatcacggatttcgtgcccggggcggttgcggtctatccgttccgctcggaacgcgaatacgaactggtccatgtcttccgcacggtctacgacggcgaggtccgtccgagcggggagcttgacggcgggcgtttctggtccccggacgaaatccgcgaaaacctcggacagggtgttttcacacccaacttcgaaggcgaagccggattgattctcgggtgattccgttgtccgcgccggcgtcgtttccggtttttcggccgccgctgcggttgaggcccgaaagttgatgcgggtacgggtatgcagacacttctgaaacgttggacgcacgccctgctcgaatggctgggcctgacttcggccaccggcgatgcgctcgaccgctgggcggctttcgtgctcgtggtgctggccgccgtggttttcgacctgctgctgcaactgggcatcgtacacggggtgcggaaactcgtggagcgcacccgggccaagtgggacgacacgcttttcagcgttccggttctccggcgcatgtgccatattttgagcgccattctgctggccgtcgtgctcccggtggtcttcgaggagaaatccaccgggcgcgtcatcgtcctgcggttcatggaggcctatatcgtcttttcggttttccgcttcgtcaacgccctgctctatgccgccttccacatcgctgcggcgcgtcccgcctggcagaacaaacccatcaagggcctgcggcagacggcgcagggcattgcgctgctgatctgcacgattctgattgtttcgatcctgctcgacaagtcgcccgccatcctgctgacgggactgggcgcctcggcggccgtgctgatgctgattttccgtgacagcatcctcggcttcgtttcgggcattcagctcgcggccaacgacatgctcaaggtcggagactggatttcgatccccaagtacggggccgacggcaacgtcgaggaggtgtcgctcacgacggtcaagatccgcaattgggacaacacgctcgtcatgctgccgccctacctgctgacgaccgattcgttcaccaactggcacgccatgcagctttcgggcgggcggcgcgtgatgcgctccgtggcgatcgacatgacgagcgtgcgtttctgcacccccgagatgctggaccactaccgtacgatcgacctgatccgcgactacgtcgatcagaccgaacggcgcgtcgaggagtacaacgccgcgcacggcatcggctccggggaacggcggatcaacggcctgcatcagaccaacctcggggttttccgggcctatctggtccgctacctccggaacgaggttccggtgaacaaggatatgacgctgatggtgcggcagttgcagcccaccgaaacggggcttccgatgcagctctatttctttaccgatacggtcgtgtgggtggattacgaggggattcagtcggatgtcttcgatcatgtgctggccgtgattcccgaattcgggttgcgggtttttcagaatccgtcgggggaggacgtcgcctcgctgcgcaatgccttttttccaaacgcgcagacaccctcgcagacacccccgcaggcgtcaccgcaggcctcctcacaggccgccccgcaaaatgcgccgcccctgcatgcatcccggccggccgccccgcaaaggccgcaggcggaacagcccgccccggaggaggctaaagcaccagcatcagcatcacctgaatgatgatcacgcgcaggaacatgcacacgggatagaccgtggcgtaggatacggaggggttgtcgccttcgatcgtgtcgttcacgtagttgagcgccatcgggttggccatgctgccgcacagcagtcccgagaccgatccgaagtcgaccttcagcacccgcagggcgaacagccccaccagcaccaccggcacgaacgtcagggcgaatccgatgccgagccacaaggccccctcggggcgcatgacggtctcgaagaagtgggttccggcatccagcccgaggcatgcgaggtacatcgaaaggcccagtgcgcgcagcatcaggttggcgctctgggtggtgtaggtgatcatgtggagccgggggccgaacgtgccgatcaggatgccgacgatgatcgggccgcctgcgagtcccagtttcacgggaatcgaaatcccggggatcgccacgggaatgcttcccagcgtgaggccgaggatcaggccgatgaacaccgccgcgaggttgggttcgttgaggctcttgacggcgttgccgaggattttctcgacgttgcggatcgcctccgcttcgcccaccacggtcagacggtcgcccagctgcaaacgcaggtcgggggtggccagcagttgcacgcccgagcggtacacgcggctgatgttgatgccgtaggtgttccgcaggcgcaattgcgagagtttcttgccgttgatttcggggcgtgtcacgaggatgcgctgcgagatgagctggctgtcgacggagttccagtcgatgttttccgtgttccagtccttggtctcctgctcgccgaagatcagccgcagggcgtcggcctcgccgggcgtggtgatgaccaggatcaggtcgttctcctgtagggttttgtccgaggtggggatcgaaacccgcccgtcgcgccacaggcgcgaaatgacgaaatggtggtggctctgcgtcgcgatttcgtggacgctcttgccgaagaccgcgggattggtgaggtggtagctggcaatgaagacgttcttgcggtgttcggcgtcgggtcccggcatgtcgcagggacgcacgaagagcttgcgcaggaagaccacggccagaattacgcctacgacgcccagcgggtaggccacggcgcagctcaacgccgctccgttggcgtcgatgcccatttgttgcagtgtctgctgcgcggcgcccagcgccggggtgttggtcgtcgcgccgcacagaatgcccgacatgtcgggcatcgagactccgaaggcgtagctcatcgccatggccagggccgttccgagcagcacgatggcgatggcgggcgagacgagccgcagtccgtcggcgcgcatcgaactgaagaagcccggccccacctgaaggccgagggcgtagacgaagatcaccagtccgaaactctcggcataggtcagcatcgccgggtcgagcgaaagcccgaaatgcccggccagaatgcccacgaagaagatgaaggccgttccgagcgagattccgaaaaagcggatctttcccagtccgataccgatcgtcgagatgagcgaaaccaccacgacggcctgcaaagccgagtgctcgacgaacaattctttaagccattccattccttcaactgttgaaaccgttgcaaaagtaggtcaaattttccggattgccgcttttttgcagaacgaaaagtggtccgtatgcgtccgggcgtattattttgccttttcggggtatgacattttggtcgagccttattacaaaaacgctctacctattgtgggttgggataatttgtctacttttgtattgctgggataaacacagatcatcagtgacgcacgaaggacttttctgccggagaaggtccgggatccaatccggcagccgcccggattattcaggaacttgatgttccgggtagcagcgagggtgaccgttttaggtcaccctttttgtttgaattcgtttatcagaatctcccgttttcagagttgcaacggcttcccgcggtggaaatcgggaatcttcgacggaaaacgaactcgtatttggcctgcacggtttgggtgacggcgagctgctggctgcgcacggcgagctgcgccttgctgatgtcgttgcgcgcggcccggcggttgaagatcgggttgtcgagcgggacgccggcgtattcgcggctgttatggcgcatctgtgtcccggacggccaccgcgtgttccgagccttcgggccgcagccgcttcgcgggggcggttcccggttccccgggcgcatgacggatcacgccggtcgtgcggcggccgtcgggggcgaaaaagaggtgattgcggaatatctgcctatcggtaaaaaggcccgcccggtcttttcggggaccgggcgggggtttatgctttgaggcgcaggaacgaatagccgaagcgttcggctgcggcgcgttccagctcctcgcggaccgaggggtgcgccacggctatcagcgcccgggcgcgttctgcgaggttgcggccccgcaggtgcgccacgccgtattcggtgacgacgtgctggaccatgtggcgcgtcgtgacgacgcccgcgccgggcgacagcagcgccctgatcttcgattcgcccttgggtgtggtcgaggggatggcgatgaaggtcttgccgccttcggacagcgccccgccgtacatgaaatcgtgctggccgcccacgcccgagatgatgcgcattccgaccgagtcggcgcacacctgccccgtgaggtccacctccacggccgaattgatggccatgaccttcgggttttgccggatgcggaacgggtcgttggtccatgccacgtccttcatcacgaggtctttgcggtagtccatgtagtcgtacagccggcgcgagccgagggccagcgaggccaccgtcacgccgggcatcaccgctttctgcgagttgtcgatcacgccgctttccagcagcggcagcacgccgtcggtcatcgcctcggtgtgcagtcccagatgccggtggccgccgagggccgccagtacggcgttcggaatgccgcccacgccgatctgcaacgtcgccccgtcgggaatcagttcggcgatgtagctgccgattttccgttccgtttcgctcggcacggccgtcgggacctccaccagcggagaatcgacctccacggccgccgccaggcgcgaggtgtggatcacggcgtcgccgtaggagtagggcatcgccttgttgacctgcgcgatgatggtcttggcgcactccacggcggaaaccgccagatcggccgagacgccgaacgagcagtagccttcggcgtcgggcggcgagacgttgatgagtgcgacgtcgagaggcagcgtgccgtcgcggaacagcgcggggatttcgcccaggaaggccggaatggtctgtccgtagccgtcggccagccacctgcggatgttgttggcgacgaacaggctgttgacgaggaacgactccttgtattcggggcggcagtagggggcgtcgaaggctcccacggcgaaggccgaatagaccgtcacatgctccagttcgccgccccgttcggccattgcggccacgagcgcttcggggatcgaggtgctgccctgaatgtagacgctgtcgttggatcggatgagttttaccgcctccgcggcagtcgtgtagtgcatgttgtcagcggttattttctgcaaaagcggttaaacgttcttcgagcatttcgaactgttcggggcggttcatctgcgagacgcagacgcggatgccgctctggcggctgccggtcgaggtgagcgagatggcgcagatgccgtagagcagcagctcgctcaacagttcggcgctggtcatcgcgccgtagccgaccgtgtagaagaatccgtcgctgaccggctcgtcgcggtccttgtcgtagacgatgcggaatccgtggcggaggaacgtctccttggtcagccgggcgcgccgggcgtactccgaggcttcgcccacgaagtccagttcgccgtcggccgccgcgcggaacattgccgccagggcgtgctgcgccgaatggctcgtgccggatgaggccgcatagagaaagaccagtacgtaggcgtcgcccagccgtccgatgttgtaacgccggcgcagggcggggtactcgcggcggaaaagcgcatcggagatcgccgccacggcgattcgctgcccggcgtagctgaatatcttcgacccggagaccagcaggatgtaattgtccgtgtagcgggccaccgaagcctggtagggggcttcgaaaggccgtcccaacggtttgcggaaatccatgcagaggtaggcgaggtcctcgatgacgatggcgtcgtaccgcgtggccagctcgccgatcgtgcgcagctcgtcctccgtgaggcagatccacgccgggttgttggggttcgagtagacgatggccgccacgtcgcctgcggcgaggacgctctcgatcttcggccccagcttttcgcccctgtaatcgtagatgtcgaacgactccgagggaatgccgagaatgcgtacctgactgcgctgcacggggaatccggggtcgatgaagaggattttgcgccgctgcgggtcgagctgcgagcagagcaggaatgtggtgaagctgccctgcatcgacccgacggtggggatgcagccccggggggccacctccacgtcgaggaaggctttcaggaagcgcgacgcctgcgtcttgagttccggaatgccgaacatgttgggatactgcgacgcgacgcccgcctgcagggccgcgcattcggcctcgacgcccgcccgttcgggcggcagccccggcacgcccatttcgaggtggaggaactccacgcccgtgtcgcgctccatcgtgcgggcgatgtcgcccgactggcggatcgtggcctgcgcgatgtcggctatgtccatccgctccagcgcggagcgcaggcaggacctgtcgaacggtattttcatggctttgcctgtttttgggtcgcttcgtagccggcgcggaacgccgcgagattcgtttcgacgacctgcccgcccttgcgggcgaagatggcgcggatgccggactccagtttcgcggcgtcgattccgagcagcggcgcggcggctcccagcagcgccatgttggccgagcggggcgccatggcggctttggcgacggcgtcggcgtcgaggactacggcgtgcgggagtttttccagttcgcgccgcagggcctcgccctccgggtagttcgggatgttgatcagcggcgtgatgccggtgattacccatccgtcgtcggcgagccacggcaggtagcgcagcgcctccatcggctccatcgagacgatgagatcggccgcgccgcgcggaatgagatccgaacggatggccgacgacgagatgcgcaggttcgactgcacgtcgccgccgcgctggctcatgccgtggacctcggcctgcttgatgtgaagcccgtcttcgagggcggcccgtccgatgacggcggcgatcgagaggattccctggcctcctacgcccgagagtatgatgtcgcgtttcataagcctttactttttagcagcgttgtgtcgctttgcggtctggatacattctcttcgcgggatgatcaccgagacgccccggtgggcgatctcctcgcggatcacggccttcatctcctcgcggttcttgggcaggggcacgaccgtgcggatatgtgcgggatcgacgccgatgccggcgcagatctgttccagacggcccgttccggccgaatcctgcccgccggtcatgcccgtcgtgaggttgtccgagatgatgaccgtgatgtccgcgcgctcgttcacggcgtccagcaggcccgtcatgcccgaatgggtgaaggtcgagtcgccgatcacggccaccgaagggtgctggcccgcgtcggccgcgcctttggccatggtgatcgaggctcccatgtcgacgcatgtgtcgatggcgtgcagcggcgccagccaccccagcgtgtagcagccgatgtcgctgaaaaccttgcccgcggggtattcctcgcggatcacctccgtcagggctgtgtacatgtcgcggtgtccgcatccctggcagagcgcgggcgggcggggtacgacgattccgcttgcggcgtgcgtccggcggggcgccatgccgagggccgcgcgcacgctgtcgggcgtcagctccccggtgcggggcagttcgccggtcaggcgtccgcggatcgccacgggattgggcagcacgccccggacgatctcttccacgacgggctggccctcttcgaggatcagcagcgtgccgcactcggcggcgatacggcgcaccagcgtgcggggcagcgggtactgcgcgattttcagcaccgggtgcggacatccgtcggggtagttctccatcaggtagttgtgtgcgatgccgcaggcgacgatgcccagccgtttgtccggaccctccgtataggcgttgaacgggctggcggcggactcctcttccagccgggcgtaatcctccagcagcgtctggtatcgcacgcgcgagtttcccggcatcagcacccactggcggggctgttcgggatggctcaacgggttttcggcgcgcgcctcgcccgtctcgacgacggcccgcgaatgggccatgcgggtcgtcaggcgcatcagcaccggaatccggaaccgctccgagaggtcgaaggcggccttcgccatgtcgtatgcctcctgctggtccgcaggctcgaaggtcggcacgagggcgaatttcccgtagaagcgcgaatcctgttcgttctgcgacgagtgcatcgaggggtcgtcggctgccacgaccaccagcccgccgttggctccggtcatcgccgagttgacgaaggcgtcggccgccacgttcagccccacgtgtttcatgcagaccagcgcgcgcttgccggcgaacgacatgccgagcgcctcctccatggccgtcttttcgttcgacgaccacgtgcggtgcacgttgcgctgcgcagccaggggatgctgctggatgtattccgtgatttcggtcgagggtgtgcccggataggcatagacacccgacagtcccgcgtggagcgcccccagtgcgagggcttcgtctccgagtaagagttctcgttttgccatgagcttacggtctggttcactttttacaaatttaggaaaatttaattaaaatccaatatttggcgataatttatcagacattcggctggaatcgggaaaaaatataggtttcgacccggtttctggttgaaaaatgtaaaatgcgctccgggacgccgtgcggcccgtatccggcctttcggcttttcccggaggcggggactttgcggagcggaatctgcgggacgttcacgaaattgccggaattgtttggtttgattggtttttttgcgatctttgtgctgcaaaagaataacccatgaacaactcgccgaacatcaaacaggtggaaaccgtcctgaaatacatcaagaatgagctttattccggacgtttgcagccgggcgaacgcctcccggccgagcggcggctggccgacatgttgggcgtcggccgcgcccatgtgcgtgcggcgtttcagaaactcgaattttacggcatcgtccagaccttcccccagagcggcacggtggtcgcccaggagaagatgcaggtgctcgaacgcatgatcaccgacgcgcttcagatcagacagtacgacttcgcgtcgctggtctacgtgcgtgtgctgctcgaaatcgaggccatcaagctctgcgcccgcaaccgtacggcggaggatctggagaacatcgaacgggcgctggaggagtgcgaggcgaaattctataccgaggagcgtgtctcgaaggacttcgcctaccaccaggcgctggcccgcggggcgcacaatccggtgatcgcgtcgatgctgctggtcatcacgcccgacgtgctgcgttattaccagcgttaccgtgtctgcacggttccgcaggaggaggtctatttcgagcatcgcgaactgctgcgctgcgtccgcgagaaggacgaggagggggccgtcgcgatgcagcgccgccacctcaagtcgttgagcgaattcgctgcggccttcaacgacgagaaccattttctcgaatagcgctcctgccgtcccgaaacgacaaacggctgtccccggaaggacagccgttgctgtgtttggttgcgtcacgtgctacccgcagagccagtcgcgcaggatttcgggtgtttccacctcccggcagctgaccgaagcgagcagttcgcgtccttgttgcgtgagtgagtagtacatctggcgccggtcttcgttgcagagttcgcgggtcaccagtcctttctgttccaccgagcggagcactttcgaggtgttcgacggcgtgagtcccagcagttctcccagctctcccgggcagagacgcccggttttcgagaggctgcacagcgtcatgccctcgttcaggcagatgccgtagcgtttttcgaacgcgctttcgaactggtgcacggcgcgctgaaggtcgcggatcttacaaagtttgtccatgttccttcgctttatataccgcctgcatgccgcagcgtttcacgcatttgccgcattcgatgcattttccggggtcgatccgcggaagggagttcccctcctgcgagatcgcgcccgcggggcagatcgggatcagcgggcaacggtggttctgcgggcatagcagggcgtcgaccgtcagtgccattatttacccagcatcactttgtcgatggcctccttgagcgaagccttgggcagggcgccctgggccatctggggtttgccttccatcgggatgaacagcagcgtggggatcgagcggatgccgaacgccgcggcaagctcctgctcctcctcggtgttgatcttgtagatgtagatccggtccccgtattcggcggccagttcttcgagcaccggtgcgagggccttgcagggaccgcaccacgaggcgtagaagtcgatcagggcgggtttgtcaccgaggtatttccactcctcgggatttttttcatagtcggcgaccttcttcagaaagtcggctttggtcaatgcgatcgttttcatattctttgcgtttttgttgtttgtctgtgcctggcttccggcggcgaaggccagcagcgcgaaagcggttatgagcagttttttcatcttgttttttattgttctctatcaataacgatgcaaagatagaatttattttccgataaaacaaatttccaatggaaaatattgtgatctaatgattcactgatttgaaaacggcgggtttcgcccgcgggaattttatgtacttttgatgtcaaccgacacacgcagcgcgagcagagaccgcttgcgggctatgccgtgccagaaggaggaaaacgagcgtagcgaagttaaaagcgccagaaccatccgcatgtcgttctttgcgggagtcttctccgtcccgtgctgagcgggcgcagtaagatcaggcctttacggcgcaaaaacacgcgccgtaaaggctgtggcggctcggcaaacagcacgtatctgccttcgcctgcggacgcctttgccagcctcccgctccgggcacgcaggctgtcggttgttcttgttccgctccaagcgataatgcgcctgttttatgaatgttcgcgcagtcccctaaaacccgcctcttaggcgggcgaacgttagacgggacgaagtcggcgaaggcatctgtcggagagtttttggtactttttgcggtcaaaaagtacataagcttccgcgggccgagaccgcggttaaccgccgaccaaaaagcggcaaagaacagccggcgaagcgtgcgaaatgttttgatggcgaaggaatgcgaactctcgcggattattccaggtagaccatcacgttgccgctgatctgctgcaacgagatttcgcacagtttggtgttgtactgcgccgtgaggatgcgctcctcggcgtccagcaggctcttctgcgcctcgcgcatctcgatgcccggcaggtcgcccagcaggtagcgttccatggcgatttcgtaattctccttggcggcgatcaggttctcctcctcgagcaggatcacttcgaggttgttgcggtaagcctgccagaaattcgacaggtcggcgcgcagcgactgttccagccgttgctgcgtcagctgcgcgttctcgacgccgatgcgggcgttgcgctgttcgcggcggcggttgccgtcgaagatcgtgaagcccaccttcaccccggcgttcagcccgagcgttccccgcgaaaggttccctcccgtgccgtagcggttgtaggtgtatccgtagcccgtcgtgaggttcacatagggatagttccgggccagaacggtcttcaggtccagttcggccagcgaactgttgtgctcggccatcagcagcgaggcgttcgccgaaagggttttggccagcaggtcgttccagtcgagcgtggcgttgacccggatcaccgagtcggggatgctgaacctctcgtcgaggttctcgttggccagcagttcgttgatgcggatgcgcgaggcggtcaccagttcgtgctgggacatgtatttcgaactgtcggcgttgaagtcgacgcgggcttgcagcaggtcgaggcgcgagaagttgcccacctggacgcgcgcttcagtgatgcgcagccgctcgcgcgaaagcgagaccgcatagcggaagttctccaggcgcagcgtctgctggatgtagttgtaatattcggccgtgaggctggccatgaagtcctcgatggtgatgcgcgtcttcagcgcgcccatctgctgcatctccttcaggcgtttgtagttggtgcggatgcgcagtccgtcgaacagcgtccagttcaccgccagcccgacgttggccgtctggtcgtagacgccggtctcggtcgtggcgtccccgttgcgcggggtgacggtgcggtcgttgtccagcgtgcccgtgtacccggccgagaggtcgaccgtggggagcatcccggcgtttcccgccgtggcgttgttgtcgctgacgcgctcctcgttgcgcacgatgcgcacgtcgtaattctgttcaagcccgatctccagacatttgcgcagggtcagcggagcggacgcctcccgagccggcggcgcctcctgcgctccggcggcgctgccgattcccagcagcagggccgctaaaaatgctattttcatgcgtcgttgtgtttcgatttcttgattcggttcgtcgatacgtagctgtaaatggccggaacgatgtagagcgtcagcagcgtcgagaccaccatgccgcccaccacggcgatacccatggcgatacgtccgttggcgccttcccccgtggcgacggtcagcggcagcaggcccaggatggtcgaggccgaggtcatcaggatcgggcgcaggcgttgcagcgaggcctcctcgatggctcgcatcttgtccagcccggcctcctgtttctggttggcgaactcgacgatcagaatgccgttcttggccaccagtccgatcagcatgatgatgccgatctggctgaagatgttcatcgtctggtccgcgccccacatgaagaccagcgcgccggcgatggccagcggcacggtgagcatgatcaccagcgggtccttgaagctctcgaactgcgcggcgaggatcaggtagatcagcatgacggccaggatgaaggcgaacatcaggctcgacgagctttcgcggaactccttcgagtcgccggccagcgccgtgcggaagtcgtcgccgagcgtctcgtcggcgatgcggtccatttcgtcgagtccctgcccgatggtcttgcccttggccagtccggccgacacggtggccgacaggaagcggttgtagtggtagagctgcggcggcgcgacgttctccgcgagcgaaatgaggttgtccatctggatcatctcgcccttgtcgctgcgcacgtagatcgaacgcaggtcggcgggcttgttgcgctgctggcggttgatctcggccaggatttcgtattgcttgccgttcatgtagaagtagccgagacgctggccgctcaatccgtactggagcgtctgggcgatgttgcgcgtcgagacgcccagcaggttggccttgtcgcggttgacctcgatgcgcacctcgggcttgctgaacttcaggtccacgtcggccatctggaacacggggctttcgtaaaccttgcgcatgaattcgggcagcacctcctgcaaccgttcgaggctggtggcctggagcacgtactgcacgggcatgcgcccgcggcgtccgccgaaggtgctctgctgctgcacgaaggcgcgggccttggtcttcgagcgcacggcggccgagatctgctcggcgatctccatctgcgagcgtttgcgggtagcgatgtccgtcagggcgatgcggacgttgcccgagccgctcgacacgcgggctgtcaccgacgaggcttccggcacgagcgagtcgaccaggcggttgatgtcctcggtgtagtcgcggatgtattcgtaggtggcgccctccgagccgcgcgtgttgatcgaaatctgcgaacggtcctccagcggggccatctcggccgggatggcgctccatagccagccgatgagtcccatcgtcagcaggaccagcggcagggccagccaccggcggcgcaggaacgaggccagcgtgcggctgtaaaagtcgttgagccagacgaagaacggctcggttttgctgtaaaaccagctcttcttctcttgccgcacgagcagcttggtcgcgagcatcggggtgatcgtcagcgcggcgaaggtcgagatgaccaccgcgcccgagatcaccatgctgaattcgcggaacaggcggcccgtcatgccctccatgaagacgatcgggaagaagacggcgatcagcgtgatcgaggtcgaaattacggcgaagaagatctccttggccccttcgatgccggcgtcgaagggcgtcatgccccgttcgatgcgaatgtagatgttttcggtcatcacgatggcgtcgtcgacgaccagtcccaccgagagcaccacggccagcatcgacagcacgttgatcgagaatcccgcggcatacatcacgaagaacgtgccgatcagcgacacggggatcacgatgcaggggatcagcgtcacgcgccagttgcgcaggaagaggaagatgatgatgatgaccaggatgaaagcctcgtagacggtggtcctcacctcgtcgatcgaggcgcggatgaagcgcgtgttgtcgaatccgtaggaggtgaccacgtcgtccgggaggtccttcttcatgctctccatgcgtgcgtacacggcatcggcgatctcgatgtggttggcgcccggctgggggatcacgacgacgcccaccatcggaatgccgttcattttcatgtagctgcgcgtgtcctgcggacccagttcggcgcgtcccacgtcgctcatgcggatgatgcggtcggcgtcttcgcgcaccaccaggtcgttgaactcccgcgtggtgtgcatcagtcccatcgtgcggatcgtcagctccgtggtgttgccctcgatgctgcccgaaggcagttcgacgttctcgcggtcgagggccgtcttgatgtcggtcggggtgatgccgtagccggccatcttcgcggggtcgagccacaggcgcatcgagtagcgtttctcgccccagatctgcacgccgctcacgtcgctgatggtttgcaactgctccttgaccgtcaggtcggcgatctcgctcaattcgagcagcgaccgcttgtcgctctggatcgtgaccatcagaatcggcgaggcgtcggcgtcggccttggtcacggtcggggggtcgcagtcgcgcggcaggtagcgctgggcgcgcgaaaccttgtcgcgaacgtcgttggcggcggtttcgaggtccaccgagagttcgaactcgacggtgatgcggctctggccctggctgctgacgctcgacagcgagcggatgcccgggatgccgttgatgttctgttcgagcggctcggtgatctggttttcgatcacgtcggcgttggcgcccgggtaggagcacgagaccgagatgatcgggttgtcgacgctcgggaattcgcgcacgccgaggtaactgtatccgatcagaccgaatagcaggatgatgatcgtcagcaccgacgccaggacgggcctccggatgctcagttcggaaatgttcatgcggcggagggtttattcgacggtgtcgagtttcacgggaagcccctcgcgcagctgcaacgtgccggaggtgatgagcgtgtcgccgacgttaagcccgtcgatgatctggatgctcgaatcggtccgcagtccggttttcacctccgcggcgtgcgccttgcctcccttgtagaggaataccttgtcgacgcccatctccggcacgagggcctcggtcgggatggcgatggcgtcgggaatttcgtgcatgcggatctgcaccgtcgcaaagcgtcccggcagcagtttgccctgcgtattgggatacttcgcccggacggccagcgtgcgggtggcgatgtcgaccttcgattcggtggcgtaaaccgcggcttcgaaacgctcctgccgtccctcgatggtgaacgagaggcgcgtgccgggcttgatctggttggcatagcgttcgggaacgaaaaagtcgatcttcaggggcgaaatcttcgtgagcttggccaccacgacgctgggcgaggcgtaggcgccttcgctgacgttgcgcaggccgatcacgccgtcgaacggcgcccgcagctccgtgagcgcgatgttcgacttcacgatgtcgatgtcagcgttgagcatcgccagttccgtgcgggcctgttcgtaggcctcctggctcacggcgtcctttttgagcagggcgctctggcggtaaacgcggtcttcggccagtttgagctgcgcctcgtaacgcgagagctgggccacgagcggcaggtcgttgaccttggccagcagctcgcccttgcggacgacggtgccctcctggaagttgatcgccacgattttgcccgaggtttcgaacgagaggtccacctcctcgtccggcagcaggttgcccaccgtggtgatgccgtcggtgagccgctgcggacggacgatgcgtccgttgacgttgagggtgctctgtctgcggggcgcgatcggcgctttggcggcgtcatccgatgccggagctttgtcgttcaatagattgtagaggcccaggatcaggcagaataccacgagaacgatggccgtgatgatccatttctttttcttattcattgcgagagtccggttttgcgtagggtattgtatgcaaagatacgaaaaaggcggatggatgcaaaaccgaatgggcgtccggttctggtgccctttccgacgaataaaagtgtcgtaacgatgccgaaaatgcccaaaaagcgtgttggccgtcggcttttgacagtgaaacgagccggttgctgaaatatagaattagaaaactttgtccgattgtccggtttcggacgggtgaaacggaaaaattcggaggtgaaataatgccggctttacgcgtcactgcatttttcgatcgtctcgatggccgtgttcatcgggatttttcggtttacgcattggtttaaataaattcccgatttcgccgtgaaaaccgctcgaaacaagatgcgaaaaaaccgcctgcaaattgcaagcggctgtaaacaacagagggaaaagcatttgcctttccctccttgtgacaccgacaggactcaaacctgtaaccttctgatccgtagtcagatgctctattcaattaagctacggtgccgaattgcgattgcaaatgtagggcaatgttgattaacagatagttacggtagtgaattttgtcgattaatttctctttttcgtgctgttgctcggcgcggtttacacgttggtttacacaatagggcaaattcaatgctggttaaacaataggtgaattaattgattatttgataaatagaaaaagtgacaaactctgttgaaagggcaattatatagcccctcgtttttagtctgtcacttgtcgttgtcaaaggaaaaccacattttttcggcctgcccttaaccttttaagatatatagtatatataactccattttttgtggagtaatattctttacctctaatacgtgcgtctgttccgttactaccgtacggtttctgccgctactttgcaaactgcatcagatagttttcgcaaaatccagctaacgggaatttcaccatctcgtcccgtccgtcgggtgtagtgtaatgaaatattatagcgttcgctttgacaaggcagtcgaataaatttaccgtttcgctcatgccctccatcttcatctcgttggcgattattattcctattatatcgtttatctcttcaaggtcgctttttcacccgataattcattgtttattctttacaagtgcgatttcgacgggtttatttatgtccgctgtttcgggagagaaaacgaagtaaaataattcgggataaatctcattttgaggctttatgacaattaagcctattccctctgtcttgctccattcaaccagcttacatatagcttgtttatcctctcatgctttggtcattcattctgttttcggttgtttgtatctgttcattttagctaaaatttaattgttattttatctttataaagataagattattagtggaataaacaaaataagaaagtgacaaactctgcaaaagggtcttatggattaaccttttcacaaagtctgtcactcggaattttgccaatcagttttggcttttgaatagtgattgttgagttaaggcaaattgagcgaatgcccaaacaaacgttttaaatttcgtcacctctattaccgccttaaatgtttctgttttgtgtctttcgtctttccaatctgtgattttaatatgtgtaatgtcttttccgttatcgctcccgaatcggattccatcatgtgcaatggcatttcggatatgccgagccacgttcttcacgctcttattgggttcttttatgcagctaatgtctgtatcggcaattccccatttgtccgctgaaacaacctctgtcggaagatgattgaataggctttgttgtggaattatcaataatccaacacatgcattgatgaacaatgtattttcaaacggtatttggtatccgttaacaatttcttgtgtccgttggataaactctatttcaaaaatatttttgtactccattgggcttactctgtaaaatcgtatccaacaatattatcgcctaaatctttccaatatggagcttttttataatcatcaacagctgacatcggaacatagtatttacatttccatgaagttccccaatcatttccaaaaacgttggcacctcctaaaaaaggcggtgtaagagatttgcaatagacaaattctacattgcgattgtgaaatgcatagtctccaatagatttgacacttgcgggtagcgtaacacgtaaagttgagatattgatactagatgctccataaaatgcatatgctccaatagtttctacataatcccctaatattataaatcggagtgaggtacatccatagaatgctctatcttgaatatctgtaatattatttccccaagtaacaaactgtaaatctgagcatcccgagaatgcattttgctcaatagtttttacattatctggaataacgatagtatataatttagagcagtctttaaatgcctcttttccaatataggttaccccgataaaatatcgtaattcattgaatgacgaaatcgcactaccatgaaagtaatggtaatacccaatatattttacatttgctgcctcctgatacgatagttcaccatcaagatttttatcccacgaattgagattatctatattactactgttaagccattgactagaacacaaatatttcgtaatgggatcagcaaattgaatgttttgtgttgtcgtatcattattctgaggcatagttattaccgttccatctgccaattcaaagtaaacattattctcatcctgcgtgattttgatgctgtctgcatccttgccatcctctcccgtggctttgcccagctgtgtccagtttgttccgttatcataggaaatccaccaatagccctcttgaatttcgagtttcggcgtaacaccgtctgaaccatccgcaccattattgccgtccgtcccctgtgcttttatcttttgtccgtctacaacgataaactcaccgtccagcgtccaataatagatgccgtccgtgtctttcttcacaccgataacgggcgtgtttccatcaacgccatccgcaccgtctttaccgttgtaaattacaatcgggttgctcttggcaaacttaatcgtatagcctactaccttgccgttctcggtcagcgggtctacactcgtaatataatcgttgttttggagtgctgttacaatcgtctgcaatgctgaaagattggtattcgtttcgttgcaaagacgctgtaaggcttcaaaagctgaccatgtgggtagtttgatttgcgtaccgttcgataaagtgaaaattacatagtcggtgctggtttcataatccacacccgaaaacatggaatcgccaccaatgccgtcttcacctgtggccttacctaactgcgtccaatttgctccgttattataggaaacaaaccaataatcgttttcgattttgaattgcggggtcgtgccgttggttccgtctttgccctcggcttggatttttccaccatcgaccacgataaattcaccgttcaacgtccaataatagacaccatcagtatctttctttacgctgatagtgggtgttatcccatcttcaccgtcttgtccgtctttaccgtggtagatggtaatagggttacctttgctgaaagtaattgtatagccgatttctttgccgtctttcataagaggtgtagtccccgtaacatagacgttgttttgtaatgctgttacgatagtctgcaacgatgaaatatttgtgttcatctgcttgcagagttcctctaattttgcgacacggttttccaatccgtgaacgctgttccaaaggtcatcatcatcgtatttacacgatgtgagcgcaaccaccgcaaataatgcggcaaaagccaatagttttttcatagtaagatttatttaagttgaacaagtattttaaatcttactatccgcccctcaatagtggattcaataataagaaagcgcagggctgaaagctcatttgaggatagtaggccgtaggattgcccgaacattcaaataagcaacaaccccgcgccgtatccgtaaaggatatgacgggagataaggtctgcctattctcatgttcaatgaatttcctacgttcactatccgagaataaacttacgcttccgtaaatttcaatatgtcatccacaaaggtaaaaaacatattctgaaatcgcaatgaccttatcccgcttttcgggattgttgccgtatcaaatttctgaaaaacaaagtttctatccaatagcggggagtatggaatcgaaactttgttagttgtaagttgggttaatcgttcccgcagatttcttgtattacgccgtccatgtaaatcgcctgtccgctggattgtctgccccaccagtagcaaccgtattcctcgatgataacctcgccctcacgtttcagtcgttcggccagccatgaatcaatcagccaccattccatgacatcatccgcgaacggataaagatattcttcggaaataaggtttgcccgtatcatttcctcgataaccgtgctttgattcttcaaaacacaattctgtactattcgttgcgcattcatataatcggttgttgcgagttcatgcgtattagccatcggtttgcaaaatttgtgtggtctgcctgtcgttcctcggcgcaattctccattccgttttctgtcgggtatgcactatgcgattcaatgcggagagttttgttgcagtaatagtacgggataaattgctttgtacttgtgtcaaatgcaaaattcatttctgtattctgcgcaagtttacctttagattcgtagtattctaccagcgaaataaggttgtactttccattgcgcccaatcattgcggcacgtaagcgtgtgtaaactccgttcccgtggtcgattctgtaagcccgcacggctaacaaggctttcagaatttctgtcgccctttcatttaatgttttcatggtctgtaaagtttagagttattccccattacttgtaaaaagataactccattcataaccaactaaaaagggcggcatatctccatgtaagaatagctttccgattctatgataatgcaaataattctatgctgttatatggtttcgggcataaatagggggtggtctgttttatgtggaatcctattaatgggatagataaaaattcggttttccagccgaaaagggggaggggtgaaaaatagggattgtccgctcggtcggggtatctcggtttgtttgtctgcgagtgacaaccttttcagaaaaggatattttatagaccctttcacaaagtttgtcaccttttggttgcggggtagtttcggcataaatcgcacgatgtggggaatggatgataaatagatttacccaaaactaccctataaaagaaagaatcgttatctttgccgaaaagcaagtgtatcatgtcctataaaccgccttacaccattacgccgaagatcacgaatttagttgcacaaatcagcgaagcaatcggcggctattatgcgcacgaaaatctgcgtctgcatcgtgtcaatcgaatcaaaacgattcacggcacgctggctatcgagggcaacacgctttcgacggagcaggtcacggcggtattggagggaaaacccgttgttgctcctattaacgaggtacaggaggtgcgcaatgcccttaaagcgtatgagttgctcgatatgctcgacccctgtaaagttgatgatctgttaaaggtgcacgccacaatggaggcgggattgattgacgaaatcggttgtttccgcaaaggcggtgcgggtgtggtgtcggggaaaacggttatccattatgcgcccgatgccgaacgtgtgccgtttctcgtaaacgatctgttcgagtggctgcgcaccacggatgaacacccgctgatcgcaagttgcgtttttcattatgaattcgagtttatccatccgttcgcggacggtaacggtcgcacggggcgattgtggcagacattgattttgagcaggtggcggcctatcttcaaaaacctgcctatcgaaaacattgtatataagtatcaaaaggagtattataaggcgattgccgtaagtggcggtaaagcgggttgcacgcctttcgtcgagtttattttgggggtaatcgccgaaacgctcactacccaagaaattacccgaaagactacccaagaaattattttggaagccatcgcccgcaatcccagcattacgcgggcggagctggccgaggttgtcggaatctcacccgacggcgtgaaatatcatttgcagaaactcaccaagtcgggcaggctcaaacgggtggggtctacacgctgcggggagtgggtgatcgggtgacaggaattccgaaaaaggtacttttatagacccttttcaaaagtttgtcaccgacctgttttcacccgttacgggctatatgattcgctttcccaattcgatgaaccgttgtttgttggtgcgcacatccctgtactcgaaatagattccgatcatctttgccgtcacttttttgcggtaggggatgccgaaccgcataatcaggtcgttcataaaacgattgacggcgcacacgggtagtttgtcgcccgttttcagtcggtcgtacacctctccgcaaactttttccgaggtcagcagttgttggctttcgttttcctgtatctgtttaccgattgcgttcatgttgtagttgtgccgctcgatctctgccgctccgagggcgtagtaggcatccaccatcatcggcacttggctttgaatctcctcgcgcagaaagtagtattcattccacgttcggttttgttccagtatctccaactgccgcacgatttcgcggaacaagtctttcattttcagtcggggatttatgcgttgcagtcggtcgcagtccgacaacggatagatatgttcggcgcaatccgtgtgaaatgctttcgcgtactcctcccgcaccagttcggcgtcggtgtagtattgctttatccgctcgtcgtcgtaggcgttgtcccacatgaaccagttgcgcgttccgtcggcgttcatgaaccgtttgtagtccattccctccaacgcctgcgcacgggtatcgcaacccgcccccgacgcttcgatttgcaggacttgtttgtagaccgcttcgcactcctccaacctcgtggcgatctcctcccgcgatttgcagggcatctccttgttggtgctgaaaatatgcgcggcatcctccacgccgttgcggaagcgtccgacgatctgcacggcttcggtcgtggggtcgatgacggtgtgcgccgcaaacgaaaggtcggttacgatcagcacgcaggctgttgtcggcagttcgatgtccaccgccgaaaagaaacggctcgtgaaaaagttgatttcatccagttcttcgagcgaggagtaagcccgcgaaaaatcccgcttgcggagtttcttcacactctcgtaactgcaaaagaccttgcaccgtttctcgatcttataggtgcagatcatgcggtggatcgtatcggtcgagttcagaaagatgcagagcggatgccctttgccttttacctgtcccataagggtacgcacccagccgacggtgttgttcgtgtgtatgagcaacattttcggcttgtggtcgtaggtcgggcggagtatcttcatcgtaaatccctgctgctcgaaacggggatcggacgggatgatcggcgtcgcggaaaccatcgccttttgtttgcatcggaaaaaatcatccatcgggagcgtgatagagccgcggtagcctgcatcctgtatcgtgcgttcgcactcgtcgaacagcatgaaccattcaccgtgcatatccgtatgcgtctgcaccatcgccgagcggactttggggaaactttcgggcgtggtcatgattttcaggtagccgtcgttgtagttcgtgttcagaaagtcgatgatgtcctcggtcgttacgccctcgaacacgccgagtatctgcgggtgctttttcatcttgccctcgataacgggaacattcggctcgatgatgacggagtgtcggggtgcattgatttcggcataggtcgcaccgcatcccgtgacggtcttgttgatgatcgagttggtcggtatttcgggcatcacggcgtcgaaccgctggcctgcatctattgtgatatattcaatcttcatctaataatttgatttgtagttaaaaaaacttggggagcgagcggtgaaacccgctcccctcgttcagcagtttagttcagcaggtcggtgatgtcctccattgcctcggcaggcattacgactttgccgttggaaaagtggtactttttggcaaggtagccgattccctcctcgctctcgttgtactcctcggaggtgatcggggtcagtttctccacctcggcggccacctctgccagccactcggactgacagcagatttcacggtcgggttcaaactccgttacttcgggcaactccttacccatcaggaacgccatcaggtagttccagatttgggcattgagcaacagcttcccgtccaactcggtgtaacccttacggattccgaaccacacgtagccgcatccagccacgtctacacgggtggtcacgatcagggtggtagcccctgccgcaatcgctttcgccagcgtgcggaacattttggcattccctgcgggtttgattttgataatgcgaagattcattttctcctcctgctcctcggcggctttgatttccgccatctttgcctcgtgtgcgattgccgaggccatcatctcctctgcgcggttcccagctacctgctgcgattccgcattttctgaaattgtagtcatagttttattaaatttgatgttaatattgtcgttgatgtttgcaagcgttttcataatcgttatcttttttattaagttttgttgccgcctctttcgggctgtcggctactccccgaatcactcgaataaccgtacgctttattcgcggattctggctattgaacctgcataaatccgacctttggtgccttggcgaaatataaataatagccagcgaaaactgacctattcattacctttgctgtcgaaaatattgcaaaatatatcagggaaaatattgtaaatctgtccgttatgacaaaatggcaggtgccatgacactggcagatttttggcagaaaaaagaaagggaaccgcgataaacggctcccttaaatggtatggttatatagtccgatcagtccaatagcggaaaatcaaaatcctgcatgataacctgtctttgcaatggtatcggtctgaatcgtggtgcttggttcatagccgctcgtttcagataggcggcaaggtcggcgcggattactttcgggtcgtatttgccgctctctcctttattattgggataacaacccgtgacgcgtgtatagtcgtgaatgagttggcataattcgttcggcatattgggctggctggggattgcgttttcttcatggagcattcggtaaatgccgtatgcaactgccgaatagatggcattcttcttttctcgccccgcagacggtttgcgccgttgaatatcctgccgtgcttcctcggctgtctgtacttcgggaaaatagcttgcaagttcctttttaatcagacggaataaccagttattgctgtttggaatagaaatctgttccgcttccccattattggtgcgaattgtgatggcggtctgtttgttgcttttaagtgtccgtgcctccatttgctccataaaaagcaataggtgcgcccattcgctttggtatatgtcccaagtatgaaactgaacaaggtcattgtattcgttttcgtcgatctgctgttcgcggatgcagtaggccaccagcaatagggcttcctctattatcggggtaattgtcccgtaagagttgataagcgacaacaaatcatggcattcgaggtgtcgaaacggcaaaaccagattgcaatcctctttaatgctgtactttacgatattaccctctcggtgaggtatcagacatttggcatttgaaagttctttgttgaaataacctgccgtgatgccgaaatatttttccagtaagggcaggcaagcggtgaaatattcggttgttacggggtaaaaggtttgttcttcttgcataggagtatctttataaagacgaatttacaaaattccgctttctgccgcaaccgacgaccgcagaaaaaagaaaagggactacccgatgcaagcggataatcccttaaaaggtagtgataaatttagttttgggggctataagatagaccttttttcaaaccttgtcaccacctcacaataagttttgcatggccgcatctatctgcgagttctcgaatgaatcgaggtagatttgcgtaatcttttccgaactgtgccccagcgattccgaaatgatggatgtcgaaactcccgaccttttcagaacagttgcgaacgagtgccgcgcaacgtatgtcgtgagcgtgataggcaggtgcagatgctcgccgattagtttcagatagcgatttatccgcttgttcgtccgttgcacccgtccgtactgctgttgcgccgtaacgtgaacagaacgccttaaaacagggaaaatgtaatcctgcggatgtgcgttcggttggcggtacttgtcgaggatgtcgagggcggcaggttggagttggaacgacaggagtttacctgttttctgacgattgataaccaaccgttcgtccacgatgtctgcatagcggatgtgcaaaatgtctgtcagattgatgccgcacgacaggtagctgaacaggaacaagtcctttgccagttgcaggaacggtttggggtacttggtcagcgtgcgtacctcgcaatccataatccgccttatatcctctttcgttagcgaccgtttggccgtggcttccttgaatcggctcactttgaacgtgtcgaaagggtagtctgcctttttgattagaccgtcggtgattgcgctgttgtacagcacccgcaacgaacggaaacggatgccaatggagttgtcggaataatgccgttccacccgcagccattgttcgtatcgtttcagccactcggcgtcgatgtctataaaataaaagtccagcgaacggcagaatttcgtcagcgaggtgcggagttcctgaaaggttttggcgttgcctacacgtttctcggccagcaggcggtcgatgtagccgttcagatattcgctgacggtttggcgcacgaccttgcgggatgccttttcgagaagcgtgtttagtgtatattccttgtcgctggttttaaagtccaaaatctgctcctgcaactctttcgtcttggtttcaataagggtgtttatgcgctctttatcggggcaattccgcttgggacggcttttgtcaaagtcccaaaatttggcatcgagggaaatgtgcaggctgatgtacttgattcggcggtttttcgtgagccgtaacatgagggggtgagtgccgtcagatagggttttagaggtgtacaggacggttgtgagggtggtgttcataaccaatttcggtttaaacattggtttaaacaaatccccgatttcgccgtaaaaaccgctcgaaacaagacacgaaaaaaccacctacattgctgtaagtggttgattttgagagtgacaccgacaggactcaaacctgtaaccttctgatccgtagtcagatgctctattcaattaagctacggtgccgaattgcgaatgcaaatgtagggcaaaaatccgaaacacgcaaataattgcttaaaaaatttagtaaaaaagatgatccggacgacgggtgttatgccatcgttcggattatcagtcgtttaaaaaatgacgctatttcatcaattcctccagccgggactgcaattgcctgccgggaaggttgcgggcgacgatcacgccgtcgggcgagatcaggaaattcgacggaatgaagcggatgccgtacattgctgcggcagggctttgcttgccgcagccgggggacagcacgttcgtccacggcaggtcgttttcggcgagaaaccgctgccagcgtgccgcatcgtggtcgatcgacaccgcgtagatcgaaaatccgcgtccgctgaatgcggcataggcttctttcaggtaggggatttcccggcagcagggaccgcaccacgtggcccagaagtcgagcagcacccagcggccgggtcctgcgagcgacgagagggcgacggtctctccgtcggcgtctttcagcgtgaggtccatgtagggtcggccgacggacgagcgttcgacggcttcgatctcgcgccgtacgctcgccagcacggggtggttctgcaattgggcggggaactgcgcgagccgttcgcgggccttcgccgggtccgcatcggtgcggcgggcgtagaggaatgcgcccagcaggttgtcgcggttggcttccagcgcgtcgccgggaatctgccggtaaatccgtcccagcgagtcgagtttccgcctgcgctcgggtgtgtccggttcgttttccagtgcctgcaggacgttgccgagcgatacctgcgcggcattcatggcgttgaatgcatcgttgagcggcgttccggtgaactggaagccgcgtacgtcgcccgtgggctcgagccggatgtcggccgcttcgagcaggatcggcgccccgatacggcggtcgttgtgcatcaggttggcgatcgtcggttcggagacgtgtccgcggatgcggaatgagctgtcgcggcgtatgaccgtcgtggccagcaccgagtcgttctcgtagggcgagcacaggcggagcgtgtcgcccggagcgaggccagccctgcccgaaagggtgtaattggggcctccgcagccggatagcgccacggcggcgaggattgtcgggcaaattctgttcatcggaaagtctttatttgagtacttctgcgagtttttcttcgaggtgttcgccgcgcaggttcttcgctacgattttaccttcgggtgagatcaggaagtttgcggggatggaactgacggcatagagcgctgttggatcgaatcctccgccttttttctgtgccacattgatccagttcatgtcttgttcgccgatggtgttttcccaacgggtcaggtccgtgtcgagcgatacgccgtagatttcaaagcctttggcgtgaaaggtttcgtaggctttcttcaggtggggcacttcgttcatgcagggcgtacaccatgtggcccagaagtcgagcagcacccagcggccgggacctgtgagtgacgagagcgcaatggtctctccggcggtgtttttacaggaaaaatcggtatagggttggccgacagcgctccgtgcggtggcctgggaggcatcctgcgactttttcaacatcggatgcgcttgtattccgggggtgaattgcgccagccgggctttgactttttcgggattgtccttgatgttctggaattcgtagctgttgaagacccaggctccgaaaacattgtcgaggttggcgtctacggtttgggtatagagtgcattcatttcggccaggatcgcttggagcgactgccccggggagcctttgcggagtttgtctccgaaagcgtacattgcttcgtcgaatgcttttttccggtcgttgagcggtgttccgcagacgacatagccgaatgcgggatcgtatttctcgattcggatttttccgggttcgaggaaaaaccaggcggggtggttggttcgcttcgcgttggccaggaaaaccaggtcgggagtcgtaacggtcccttgcagcgaaacggtcgtgtcggcgttcacgacaccggcggcgagcaccgtgttgtcggaagccagcagatagaccgagtcgcccggaggcagttcgtagcggcctgtgatggtgtagtttgcgcctccgcaactgcatagcagggcggcgagggcggcggtcggaaggtttttcatggtggcgggtaggttggtgtcggttttatttgatctcccggtcgggattctttttcaggaattgctcccagctctgcgagccgcccttcgaggcggcttttttgccgcctccgagccccttgacgcgttcgtcgcccagcgcggcgttgagcggactggccgaggtgaagtagtggcacagagcgacggccatgccgtccgtggcatcgagccgcttgggagggcggtcgatggcgagcgtgcggcagacgatggaggccacctgctccttggcggccgatccgcggcccgtgatcgactgtttgatgcgcatcggggcgtattcgaaaacgtcgatgccgcggctcaacgctgcggccatggccacgccctgcgcccgtcccagcttgagcatcgactgcacgttctcgccgaagaacggcgactccagcgccacttcgcgcggggcgtactcgtcgaccagcgctcccacgcgctcgaaaatgtaacgcagtttggcgtaggggtcggggagcttgtgcaggtcgatgtcgcccagcaccaccgagcgcaccgtgcgcccctcgatctccagcacgccgtaacccatgtagttcgtgccggggtcgatgcccatgattctgtatttctcgacggatttcatctgcattttatggaaaaagcccctccttccggctgtacggaacggaggggccggaatgtcgttgggaaattactgggccagcagctccgagatcttttcgtagagcgcctcgccgcgcaggttcctggcgacgatcgtgccctgaccgtcgatcaggaagttcgacggaatgccctggatggcgtaatccttggcggcctggttgtcgaagcctttcacctcgctgacgtgcagccagttcatgtcgttctgctcgacggcgccgagccagtcgccgcggtcctcgtcgaacgatacgccgtagatttcgaaacccttcttgcggaactcgtcgtaggtcttcttcaggtggggaacttcgcccatgcagggaccgcaccacgaagcccagaagtcgagcaggacatatttgttcgccggattcctgaccaccgattcgagcgatacctgctcgccgtcggcattgggctgtgcgatgtcgatgaacggctggccgatgtcggtcttgatcatctgctcggcgttctccttgagccgcaccagtgcgtcggtctgctgcatctcggccgggaatttggcgatctcgtcgagcagttcctgccccgaaagctcgtagccgagctgctgggacagcagcatcacgccgaagaggttgtcgcggttctggtccaggaccgtgcgggtcagctgttcgtactcctgttcgatggcttcgcgacgctcggcggtggtttccggattgcggaactcctgcacgagggcgcttccggccgtggcgtaggcgtcgctggcgtcgttggccggcgtgcccgtcaccttcttgcggtaggggttctgtgcgtcgtcggtcacgttgatcgtgcccggttcgaggatcagcatggcgccgaacgtcgccccgtcgtcgcgtgcgtcgcgcagaatggccgcctgcggtttctcggccacgccctcgaagcggaacaccccgttggccgcggccgccgaatcgaggatgttgtccttctcgtcgaagaggtaaaccatgctgttggctccttcgaccttgccgtcgacggcgtacttgtttttgttggcgcagctgcacaacacggctgccgccgctgcgaggatcaggatttttttcatcgaattatttttttgtgagttctgcaagttgtttttccagcgcgcggacctgctgcgccagttcgggcagacgtttgaacacggctgccgaacggtggtactgcatgcccgggagggcggggtatccgaagcggatttcgtcgtcgggaacgtccttgtcgagtccgctcttcgagccgaccttcacgcggtcgccgatggtgacgtggtcggcgatgcccacctgccccgcgaggaagcagttgcggccgaccttcgaagttcccgcgatgccggtctgggccgacgacacggtgttctcgccgatctgcacgttatggccgatctggatcaggttgtcgagtttcacgccccggcggatgacggtcgagtcggtcttggcgcggtcgatgcaggtgttggcgccgatctccacgtcgtcctcgatcaccacgttgcccagctggggaatcttgtcgaatccgcccgcggcgttgggcatgaacccgaatccgtcggcgccgatcaccgcccctgcgtggaggatgcagttcgcacccacgatgcagccttcgtagattttgactccggggtagagcgtggtgttgtcgccgatccggacgccgcggcccacgtagacctgggggtagatctggcaaccctcgccgatgacggcctcctcctcgacgaccgcaaaatcgccgatgtagcactcctgaccgacctgcgcccgttccgagaccgatgcgcggccgctgatccccttgcggcggggtttggcggcgttgtacatttcgagcagtttcaggacgcaggcgcccgcgtcgtccaccttgacgagcgtcgcggccaccggctgcgaaggctcgaacgcacggtcgaccagcacgatcgacgcgcccgtggtgtagagaaacggttcgtatttggggttcgtgaggtaggccagcgatccggccctgccctcctcgatcgacgaaacggtgtgtaccttggcgtccttgttgccgacgatgtcgccgcccaggaatccggcgatcatttcggctgtaaattccatcatatgtttcatatgttacaggtatttgttaatatctattcctatgggcatgaactcttccacggtgcggccgaacgaaagcacctcgcgcacggtcgacgacgagatgtcggccacgggcgagggggtgaacagcatgacggtcgtgatgtcggggtagatgcggtggttggtggcctccatcgtgcgttcgtactcgaagtcggtggtgttcctcacgccgcggatgatggcgcaggctcctgccgcctcggcgaattcgcccgtcagcccggtgtagatgcacgcctcgacgcgctcatcgccgcggtagatgtcgtcgatgagccgcttgcggttctcgaccgtcagcagcccctgcttggaggtgttgttgccgatgccgatgatcacgcggtcgaacaggttcagcgcttcgtcgaccagagccgcatggccgcgcgtgaaggggtcgaacgacccggggaagattgcagtgcgttccatatcggacaaaggtagaaaaaaaacggaaaaacagcacgttttcccgtttttattcattgcagccgcggcgggtcactccttgtggagcagaccgcgcaggcgacgcagcgccttgctcatctgcgcttcgacggtcttgacggaaatatgcatttcggcggctatttcggcgttcgagagctgctcgttgcggcttttgaggaagatgtcgcggcagcggccgggcagctgcgagacggcctcggccacgagctgcgtgatctcgtcggtctcgatctgcaacgactcggggctggcgaaaacctcgcctaactcttcgaacggaatgtaggaaaaacggtcgtcgcgcaggcggttgagcgcccggttgcgcacggcgcggaacagataggcgcgtaccgagacggtgatccgcagctcggcggcgtgctgccagacatgggtgtagacgtcgagtacgacctcttcggccgaagcgcggtcgcggagccagaactcggcgaagcggcacaacggcgcatagtaacggtcgaacaactcccggaaggcggcgatttccccccccccgttcgattctcaaccacaggtgaacgtcgtattcgttatctgacatggcgtgtcgtaagactgtgtaaaagtactaaaaatcgggattccccgaaaagccgttgcggaaaagcaggccgcagggtggggaggcgacccgcttttccgcggctttgttcactcgatgtcctcgaagaagaattccgagaattttagttttgcgtttccgtaaagttccggcaggagccttttggcccgtttttcgaaatcgtcgtaatccttccggtcgtatgcccaggcgatttctgcgatggcggccatcctggggagcgtcattcgctgcacatggccgaaatcggcgatatattcggtccatacgtttccctgaatgccgaggatattcctgtactcggcgggtttcaggcggtcgtagggatcgagtcggtaaacctgcctcatggagaggtaccgtgtgggtcctatcggctcgtacttctcgggatcggaagtctgcgagtagtcgaggtagcagttccacttgggtgtcatgatgactcggtttcccttcctcgcggcgtccgttccccggaactgatccgtccaggccatgattaccgctgacttcgatattccgccctgcatgatctcgtcccatccgatcaactcgcgtccgtgctcgtggagccacttttcgacgcggtgcatgaaataactctgaagttcgttttcgtttgccagtccctcctcccggatgcgcctctggcaggcggggcactccttccagcgctccttgggacattcgtcgcccccgacgtgtatgaatttcgaggggaacaggtcgagcacctctgcgagcacgttttccacgaattcgaaggtctcctcctttccggcgcagagcacgtccttggaaatcccccagtgggtccatacctcgtagcccttgccccggcatcccagctggggataggaagccagcgccccgagcatatgcccgggcatgtcgatctcgggaatgacctcgatgtagcgctctgcggcgtaggccacgatggcgcgtacgtcgtcctgggtgtaaaaaccgccgtagggttttccatcgtatcggttgcggctttcgtcggtcttgtcgtatcggccgatgacggtctccctgcgtacggacccgatctcggtcagcaggggatagcgtttgatctcgatgcgccatccctgatcttcggagagatgccagtgaaatacgttcagcttgtgcatggcgaggatgtcgatgaaacgcttcacctcgtctacggtccagaaatgacgcccggagtcgagcattccgccgcggtgtgcgaagcagggtttgtcgcggacgacgaccgcgggtactgttccgtcggtagcgacgagttggcggagtgtctgcaaggcgtagaacacggcttgcggggagcctccgagaatttcgacggtacggggcgtcacggcaagagtgtactcctcggcggcgagggacggggatgtccggagacggatttcgcccttcgcggccacgggtatttcgcgcccgatgacgggttcgatgtccgttgcgaagatttcggcgggacgccggagttctccttcggcggcgatggcggtctgggccgtgatccgaaactcacctctggcttcggtgatttccgcggggcgcgggatgatgtcgatgctccgggcggagccggctgccgcgagaagtgtgacgaagattaataaaatgctctttctcattggattggggaagggtggtggctgaaaaagccgcctgcgggaacgctcccgcaggcgggtgataagggattagtcgaggtccagttcttcgaggttgccccagacttcgaattcggcgaatgtgccgcctttgtaggtcatcggcgtcggttttacgctcgacccgctgttccacgacatgtggagcgtgaagcggatgtagcgcgcccgctgtatttcacccagatagaccgagttatggagcgagtgggacatgattccctcgtcgggcttcgtcccggtgaaccgttcgctgtatgtccagtccgcgtcgttctccatgccgtcgcccgtgatggtcttggccgtttcgatcgtgatgtcgcccggaggattgttcagtacgccgccggctttggtgcgggccgtgatgcggacgccgcgcacggtcacctccttgcccatgtcgaagacgaaatagagcggaacgtagaccaccggaccgacggatgccttgaaattgtaggtccaatagctcgccgggttgccgtcgagcacgtccttggcccacccggtcttgggattgccttcgcccggggtgtattccgaggtgcagtggaccactttccagccttcgcggtcgagcagctgggcgggcggcagcacgcgcttgttgaagaggatgtagtagacgttgccctcgtcggaggtctgcgcagcgtcgtcgcctttgatctgttcgatggtgatcggtagcaggtactgctcgccgtcgggcatcttctcgctgtttagcgtcacctgcgccgtcgacgaaacctcgttgtagcggggcaggatcacctccttcttcgaaaattcgtaggcctcggccggcacgagttcgtacgacgtgtcgtgggccttgttgtaggcgtcgaccagcgtgcggtcgaccttgaaggtcacggtgaggttctccgcactgaccgaccgggcgacggcccggatgtcgatcgtctgggttttgggttcgagcagcgagatctggagcggctcggccccggcgttctggatcgccagcaccgcgggcccgttcagccccgttcccggattgtcgtccttgcagcctcccgacgcaatcaacagcgcggcggccgcaacgagacggatggaagcatatcgtttcatggtcgtgttcgttttgggttctacttgtttttggccgggagtttgatgtcgagcatcaccggcaggtggtccgaggctttcgtcacgtcgcccgacttgaaccagcgcaggatctgcgagcctacgacttcgcacttcggcgtgcccttgagctgcatgatgtagtcgatgcatttcgagggattgtccgacgggaaggtcccgaatccggtgatggtcaggatctcccagtctttctggagcagtttgcccgtctccgacgagggtgtggcgttcatgtcgccgcccaggaaaacgggcttcccggagtcgccgtaacgttccttcatcgttttggtaatcagctccacctgttccagctgcgcctcggaagagacatggtcgaggtgcgaggtgcagatcacgtaatcctccatctccatgacgaccagtacgcgcggctcggcgcccacgcccttgggcagggccaccgaaaacttattcacggccttcttgcgggtcgtcacgccctcgccgtattcgcctccgtcgtagggcatggccgcaccgtattcgaagtcccagctgcccatcagggatgcgaaatgcttgagctggtagacgtggcgcgtgcggttggtgttgttgtcgagctcgttcatgcagatggcgtcggcgtcgatctccttcatcatgtcggcgatgagctggtagtcgtccttgatgtatttgttgaagattccgacattgtaggtcaccagacgtgtcacaccctcgcccttggagttgtcgatcgaggcgtggggcggaatttcggtgtcgtaaaacggttcgtcctccatgcaggctgcggcattgcaggccaggccgagcgtcagcagggtcatcaggtattttttcatgagttccaacatttttcggtttgttttgcggttaaaaattcagtccgtcgttccatccggggttctgggtcagggcgccgcccgtcagcgagcggtcgtcggtcggaatcggatagaaatagtcgcgggtttcgtcccagatgccggggttgttcttgtgtggcgagatgtagccgtggtcgccgtcggagaagagaatgtcctggtcgatcaccagtgtcagtttggccgtggtcgagggcgtctcgcccttggtggcgaaatagacgtcgggcgttccgtcgccgtcgatgtcgtactcgcccttggcggggatgtagaggcccagcagcggttgttcgaaggtcttgccctccttccagcgcatgatgtcgtagtagcggaatccctccatcgccagctcgatggtgcgttcgcggcggatttcgaggatcacccccttgttcgcacccgtgacgttgggatagccggtcttctcatccgacaggtaggggtcggggtttttgttggcgtcgtcgaggatcaggttggacatgcccacacggtcgcgcagccgtttgaccgagaggttgatgtcctcctgcgtgagggttcccagctcggccttggcctcggcgaaattgaggtagacctccgccgagcggaagatcggcaggtcgttgaacgacttgttgtaggcgtcctgcgccgttccggtgacgaacttcacgacgtggtagccggtgatcgagttcgccaggtccggcgccagcttggtcgtggctccgatacgcgtgtatcccggcgtgcggatggtctgggccaggcgcgggtcgcggttcgaacactgctgcttgaactccatggtttcccagccggccttgtccgtgaatcgcgaaccgtcggccatcaggtagctgtcgacgatcttgcgcgtcatgcccggtttgccgtacgaggcgctgatggtgtagaaattggcgttgtggaagacgcccagcgccgaattatagtcgcgggcgaggatgacctcgacgctctgcgcgttctccgaggcgaacaggtcgcggtagctggtggccggtccggtcgcggtgtagagcgaatagccgctgttggtgatgaattcctcggctgcgtcggcggcctgttcgagataccatttccagtcgtgttcgtagccgtcgatgctgtggtacttgcggaacgtgccttcgaagaggcagaagcgcgacttgagcgccagcgccgtccatttcgtcacgcggtagagatcgcgttcggccggcagatagcggatggcgaagtcgatgtcctcgatcatgcgctgcatgacgaattcgcgcgagtcgcggggacgcttcagctcggggtcggccgaaccgaggggcttggcataccagggcacgtcgccgaagcgcttcaccttctcgaaatagaagtaggcgcggaagaaacgggccacggcgtcgtagcggttgcggatgtcggtgtccttgcagttgcccgagtattcgagcagggtgttgaacttgcgcaggtcggtccacgtccagccgccgcccgaggcgggaatcgtgcggccgtcgcgcatttcggcggcgatttcgttcttcacgatgttgtcgtagccttcgttgtaaaggccgtcgccggggaagatcgtgtagaaggtgttgctgaaggcctgcaactcgttttcgttcgagaagaaggtctcgggcgacatctgcgccagcggatatttgtcgagccagtcctcgcacgacgaaagcgtcagggcgcagcctacggtcagtatcgatagaatctttttcataactcttctcatttaagcggttagaaggtgacgtccacgccgaacatgtaggtccgctgccaggggtagagacgcaggttgccgttcgtggcggccatttcagggtcgatgtaatccgagcggatgcccgaccaggtaaagaggttttcgcccgtgaagtagatgcgcaggctctcgatcagcgccttgcgggtccattgtctgggcagcgtgtagcccaccgtgaggtttttcagacggcagtagccgatgttttgcaggtagcggtcgttgacggccgtcagctcgcggttggttccctgcagggccgtgtagccgcgcggacgggggaaataggagttcggattctcctccgaccagatctgcgtgtggaagttcttggggaggtaggtggcgtagggacgtgcgtagggaccccagaaggccagtgcgttggcggccgggtaccagtcctggcggccgattccctggaagaagatcgagaagtcgatgcctgcccattgcagcgccagcgtggcgccgtagtggtagcgcggctggctgttgccgatgatttcgcggtcgcccggatcgtcgacggtgttcttgccgatggagattacgttgttgtcgtccagatcgcggaatttcaggtcgccggcgcgcagtcccttttcggctcctgccgaggcgttgatgatctcgttcacggtcgtctggtcgacggggtagttgcgggcttcctcgtccgaggcgaacagtccgtcgatgcggtaaccccagatttcgccccagcgcatgccttcgtagtatttcttggcgaaggagcggtcggggttgtcgaacttggtgatgttcgaaacgtagtcgttgaaggtcagcgtcacgctgtacgagaacggacggcgcagcagctggaactcgtcgcgccagttgagcgagagctcgtagcccttggtgcgcaggtcggcgctgttcattttcggcgagtcggcgccgtaggtggccggcagggcgatgcccgcggtgagcatgtccttcgtgtcgcggatgtagaagtcggcggagaaggccaggcggttgttcaggaaactcatgtccacgccgaggttcttgtggatgcttcgctcccacgagaggtcggaagccaccggggccgagatggtcgccgtggtgggcttgtcgccgccgaacaggtagttttgactcccgatcgagattttgcggatatagtcgtaataaccgacgttctggttgcccagttggccgtacgagaagcgcagtttgaggttgttgaactggtcgcggatgccgtcgaagaaggcctcttccgagacgcgccatcccagcgagaacgaggggaagaagccccagcgctgcccgcgcttgaagcgcgatgtgccgtcgtagcggccgctcgcctcgacgaggtatttgcccttgtagtcgtagttcagacggccgaagaagcccatcagggcgtattcgttctgaccgccgcctacctccatgcgtttttcgccgtcggcgccctggcccacgaggttcaggtcgttgagcgtttcggagagcaggttgtaacccgttgcggccacgtccttgaggaatttggtctcccagttgaagccgaccatcgccttgaagttgtggtcccgggcgaaggtgcgttcgaacgtgccgtagaggttggcctgatagtaggtgtgggtcatgctcttttcatagagtttgtcctccatctttccggacgtgagcgtgtttatttcacccggatactgcgagtactcggtgttgacctgacggttggtgtagcgcgtggtattgaacatgtaggtgaagttacccttgatctccagccctttgaccggggtccaggtcagctccgtcgtggtcgacatgttgtccgtatggtcgtcgttggtgtggccgtctttgttgaggatcgtgggcagtccgtccatgatctggtagttcgagaacgacgtgttgtagacgctcgtgccgtcggggttgacgggaacgaacgaagccagtccgtgtacggtgctccacgagaaggccgtattgacatcgctcgggccggggtagaagtacttgtagttgtagtagctggtgttgttgctcaccttcagccacttgttgatgtcgaaggtgattttcgaccggaatgtgatcttctggagcttgtcgggatgctggcgaaaaagtccctcctcgctgtaatagctgcccgagagcagatagtccacacggtcgttgcctcccgagagcgagatgctgtggctcgtgttcgggtgctcgtccttgaacaggtagtgataccagtcggtgttgccgtagtaaacataggtgtcgcggccgtcgcgctggtcgatcttgacccacgggcggtcgggatgctccgtgcggtcgttgcggcgcgcccacagctccatcatgtcctgttcggtgtagcgcgtgtagttgtttccggcgtaggagcgccagaagaggtcgttgaggtagaccgagtagtagccgcgggtctcgtagtcggtcgaggtggtgggttcgttccagccccagcggccgctgtacgaaatgcgggtcttgcccgaggagtcgccgctcttggtcgtcacgagcaccacgccgaatgccgcacgagcgccgtagatggccgccgccgaagcgtccttgaccaccgagatcgaggccacgtcgttggggttgatcttcatcaggtcgccttcggcgccgtcgaccagcaccagcggcgaaccgccgttgatcgaggtgatgccgcggatgttgaggctggccggattgcccgggcgtcccgacgaagtcgagaccgtgagtcccgggacggagccttgcagcatgtgggccaccgaaggcgccgaccggttctgcagctgtttttcgtccactgtggcgatggcgcccgtgaggttcacctttttctgggttccgtaacccacgaccaccacgtcctccatcttcacggcgtcctccgtaaggaacaccttcacgttgttctgcgtggcggggacggcgactttcttgctcacgtagcccagataggtgaagttgagcgttatgtcggcgtcggggaccgtgagcgagaagctgccgttggcttccgttaccgcaccgcgggtattgtcgcccacgagcgtgacggccacgcccgccagcggcgtttcggacgagtcgttgacgacgcctgcgatcgtgcgctgccgggccgcggccttgcgggccgggatcagggcgatctggcgttcggtgatggtgaagttcagccctgtcggggcgagcatttccttcaaggcggctgaaatcggcattcgcttcgccttgaggctcacgcgttgggagaggtcggtctgcttggcgtcgtagaagaacgtgtagcgggtgttcttctcgatacgggatatggcctccgaaagcgggatgtccgtgaactccatgtcgagcgccggttcctgctgcgtctggccggatacaaccgtcgtactgcctgcgaccagcagcaagaggattgcaaatagtctgaagtgcatcatggttgaaattttaagtttgtggaaagtttgcggcggcattggtcatgggccgctgcggtaaggtcgggtaggggggcggtttatcgcttcataggcaatcgggtttttaaaggtcgtaatgcagggtttattcgagttcagaaatcgtgacggtgttgtcttcggcgaacgtgtaggcgatggggttgatgcggctcatgatgcgcaggatctcttcgagcggttcgtcggtaatggtgaacgtgtaggcgtagttgtgtgcgagggccggggtgatgtggatttcggtgtcgtaccagcgcgccatgtagtgacagatttcgcccagcgactgccgttcgaacgcgagttttcccgcggcccagcaggactccatcgccacgttgccgcgtccgatgaccactttgcgcgtgtcggggtcgtaacaggcgatctccccgggacgcagcagtctgcggctgccgcgcccggtgtcgagcgacaccgagccttcgaccagcgagaccgacacgtagcggtcggccgcggtgcggacgttgaatttcgtgccgtggacgctgatttccaacccttcgacctcgacggtgaaggggcgttcggagtctttggccacctcgaagaacccttcgccgcggagtttcacgcggcgttccccggcggcgaaacgggcgtcgcaggtgagcgtcgatccgccgtggagccagaccgtcgagccgtcggagagccgcgcctgcgacttgccttcgaaggcgcagagccgctgttccgccgtctctgcggcggagcggaagaggtcggcgcgggttgcgaaaagggtcacggcgactgccgcggcgacagctatggccatttgcagcaggtggctccggcgacgtttcggaagctggtccgcatgcggaatttcgtaggttccgatccgttgctgcaactgccgccacagccggtcgcggtccggctcgtaagccgcggcccgctgctgtatttcgcgccatacgcgggtcaggttgttgtagaagcggcggttttccgcttcggcggcccatcggtcgaattcgcgctgttcggcctcgccgagcgtgcctttgagggcgccgaccagaaggtcccaggtatggttgtccggattcatggtttgctgtcgtttctattgtgacacgaaaaatccggccgacccctacgggacagccggatttttgcggaaaatttttcagcgttcgattttcacgtactccgcatagacgatccgtgtgtggggattggtcgagacgatctcctgccggagggccttcgtgccccagcggatgaagaggaaacggcgcgggatgcggtggaccgcctggcgcagggtgtcgacgctgcggatgcggcaggcggccgagtcgcggccgatgcgtccttcgaccgaaatccacgggtcgcgccagcggaacatccggacggtgtcgcgcacggggagcgtgtcgtgtatccggacgacgacggtgtcgcgcagcggggtgcggatttcggcgtcggtgacggcgacggccttggcggcggcttcgagcctgcggagccggatgccgagacgccggatctgctcggcgtcggccgcgcgcagcgtttcgaactccccgcaccgcagccggagggcctgcaccgaggccgcctccgcgcccagccgtgtgcggtaacgggtgacgtcggccgccagggccgtctggttttcgaccagccgccggttctcggcgcggtaatggcggcaggtgaaaaacagcagtgcggttgcaagaaccgcatacgcaaagaggtattttttcacgattttcgggttttggttccccgaaagataagacggttgcgtccggtccggtttctattttttcggaaaaagaccctccatcgcttcggcgatgcgttcggcgacgaaggtcatcagcggcagcccgtcgcagcgcgaaagcgaggtgacgccccggtggtcggcgaagaaaagttcgtcgagcgagggcaggtcggcgcgtccgaaggcctcttcgctcagttccagccctgcggcccgaacggccagcatggccaggcggcgttcgacgcttgcggggccgggggctgttaggacggtgcggccggcgatggccagcagcggcgcgtcgtcggccgagcggagaattcccgcgctgtcgcagcgcacggcgacttccgccccgcgccgttcggccagcctgcgtgccagctgcgctgcggcctcgcgcgcggaggtcggagcctcggagagcgtcagatcgtatccgacggtcacggcttcgggctgaaggctccggaaggcgtagccgtcgtagagcgacacccctgccgggagcagacgttccgtgccgtcggggtccagttctatgcgcacgaagcccgacacgcccgccggatagcgttccgcggcggagagcgtctcgatacgcttcgcgagccgctctgcggcgggggcgtaggggcgtccgaacagttcgcgcgacgcggcgtcgagcacggcgatgtgtccggcgacgttgcgcgcgcggccccgggccagatgcacggtctggtataggtagagaccggtcaaagcagaaagattttcagcagcagttcgcgcagcagttcgccgtccgacgcgccgcccgcacccagtcccttgctcttggcgtcgtattcgcgcagcagcccgaggatgttgaacaccttgcggttgtcccatccggcggcgttctgcttgatctcgccgatgacgaacgtgttgttcttgcgcaggatgcgcatcagttccgtgtccggcggaaagggccgtcctttgtggcgtgcgagccagcgcaggtagttgaccacgaacagctccttgaactgcccgaacagcgccatgacggtcaagagcaacgggttgtccttggggttgcgggcgaagtgctcggcgatcatcagcgcgcgggccatgtcccgcgtgacgaccgccttgcagagttcgaagttgttgaaatccttcgaaatgccgatgttggcctcgatgtcggcgtcggtgatgcgctgcgtaccctcgggcagcgagacggtgagtttccggatttcgttggagatcttcgcgatgtcggttcccaaatggtcggtcagcatcgaaagcgccttggggtcgatcgtgaatcctttctgccggatgaactgctgtaaccacgccgcgatctcgtagtcgcgcgggcgcaccgattccagcaccgtgccgttcgctgcgcagcccttgtagaaggccgagcgtttgtcggcgttcttctccttgtggcagatcacgagaatggtcgtcggcgagggcttctgcgtgtagagcgcgagcttgtccagccccttgagctgctgtgcctccttgaggatcaccacctggtattgtcccatcatcggcatctggcggcagaggttgatcacctgccccgcctcggagtcgcgcccgtagacggtgatctggttgaaggcccgcgcggcctcgtcgaggatcgtcgcggccagctggtccgagagtgcgtcgatgaagtagctctcctcgcccatcagcaggtagatgccggaaaaccggcgggccgcgacctctgccgcgatccgttcgtactgggcgacggaatccttgaatttcagagcgctctttgccattttaaacgatttctttggtgatgcgcaacacgttttccgtgtcgggcgtaaggcggtagcggtcgtcgatgcggcgtccgacgagccagacgatctcgtcgcccgacagcagcacgaactgccgctgcttctcggccacggagaccttggcgtcgacgaggaagtccgacacctttttgcggcccgtcatgccgaacggcacgaaccagtcgccgtcgcgccagcggcgcagcgtgagcgggaattgcaggcggtcggcgtctatctgcgcgatgttctcgggaacgccgaaattcttgatcgtgtcgatgtcgcagtattcgtagtagaggaccgagttgccgcagtagctgcgcggggcgcctttgcgcaccgtcgtcagacacgcgtcgtcgggggctatcggcgctatgacgatctttccgcggtcgatcgaggccaccctttcgcgggcgtagaaccgccgtcccgtggcgtcctgttcgagcgagtggcacagcgcgtcgatcacgtcgcccttgaatccgtagcccgaactcaacagttcgtagatcacgaatccctgcggaaaggccggatcgaggcggtcgagatggatcgtgtcgatccccgtgtccgaggtgacggcctccgagcggatgcgttcgatgccgtggttgatgaacagctgggcgtcggtcaggcgcgcgaggttgcggctcatcaggctcgtgaacttggggttgatttcgcggatgcgggggatcagccccagccggatcttgttgcgcaggtatttggtcgaccggttcgacgaatcctcccggaaggggatgcggttctggacggcatattcgagaatttccttgcgcgacgcgaacagcagcggacggatcacctttccgacctgtgtcgagattcccgtcagcccccgcaggccggttccgcgcagcaggttgatgaaaaaggtttcgatcgagtcgtcggcatggtgggcgatggcgatggccgtgtagccgtgctcgcggctcaaggcgtcgaaccatgcgtagcgcagccgccgggccgccatctccatcgactcgcccgtgcgctccatttcggccctggtctcgaagcgcctgttgtagaacgccgcgccgtgctttttggcctcgtcttccaccagcacttcgtcctcgtcgctctctgcgccgcgcagctggaagttgcagtgggccacgcccacccggtagccgcagcgggtgaacagcgagagcatgaccatcgagtccacgccgcccgagacggtgagcaggatacggtcgtcgtgcgtggcgaggtcgttctcgtcgatgtagcgttgaaaagagtccaaaagattcataatatgttcacctccgtatctatttcgatgccgaatttttcgcggaccttcgcctgcaccgtgcgggcgaaggcgatcacctcgccgcccgtggcgccgccgtggttcaccagcaccagcgcctgccgctcgtgaacccccacgcttccctcgcggtagcctttcatcccggcccggtcgatcagccacccggcggccagctttacgcggccttcgggggccgcatagtgcggcatgtcgggatattcggcaaggagccgtttcgcgacgggggcttcgaccacgggattcttgaagaaactgcccgcgttgcccagcacggccgggtcgggaagtttcgcgcggcggatcgagcagatcgcctcgcggatgttgcgcagcgtggcgcctccgcgggcttcgacctcgcgctccacgtcgccgtagcccagtttcggacgcggcgtatgcgagaggcgtatttcgatggctgtgatgatcacgcgccctttcaggtcgtgcttgaagacgctttcgcggtagccgaatccgcagtgcgcggcgtcgagcgtcagcaggttgcccgtttcgacgcagtacatctcgacccggcggatcgcgtccttcgcttcgcagccgtaggccccgatgttctgcaccggggcggaccccgccttgccggggatcagcgagaggttttcgatgccccacagaccgcgttcgacggcccattccaccaggtcgtcccattcgacgcccgcctcgacgcgcaggcgaacttcgtcgccgtcgtcgctcaaaagggcgatctgccgggccacgggggtcagcagcacgccgtcgtaatcttcggtgaaaaggatgttgttgcccccggcgagcaccgtccaccgcccgggaatccccgcggcgaaaaacgtgcgcagatcctcggccgtttcgaattctacgaggcgtgcggccctctggtcgacgccgaaactgttgcgcccgcgcaggctgatttggtgaaattctcgaatcatggtatgcaaagttagaaattatttttaactttgagattcaaacctgaataactcaatggtgtggctgatctgcatactgctgtccttgcttgcgctgatccgtttttttggcggcgattcccggcgcaaacgtcggaggcaccgcaggtttggcaatcggtgaccatgtaaacgataacagaatatgttcgacgaaaaagatttgcagcaaatccgggagcacggactcactcccgaacaggcggagacccagttggagaatttccgccgcggattccctttcctgaatgtcgtgcgggccgcatcgccgggcgacggcgtgctggttgtcggcgcggcggaggccgatgccgccgtggaacgctatgaaaaagagtctgccggactgggggtggtgaagttcgtgcccgcttcgggggccgccacgcgcatgttcaaggagctgttcgagttcgtcaacgacggcaaacgcggcaagggcatcgacacgctgctggaaaatatcgggaagttcgccttctggcccgaacttcgcgccgtgctgcccgccggggccgacgaccgtgcgatcgtgaatgccatcgtcggcgacgggctgaactacggccgcaagcccaagggcctggtcaccttccacgcctatcccgagggggcgcgcaaggccgtcgaggagcacctggtcgaaggggcggcctacgccgcggccggaggcgtcgtgcgcatccatttcaccgtctcgcccgagcacgtcgcgggcttcaaggagctgctcgccgcaaaggtccccctttacgaaaagcggttcggcgtccgttacgagatctcgttctcggtgcagaaaccttcgaccgacaccctcgccgtgaatcccgacaacacgcctttccggcaggacgacggcacgctgctgttccgtcccgcgggccacggggcgctgatcgaaaacctgaacgagatcgacgccgacctgatcttcatcaagaacatcgacaacgtgacgaccgatgcccgccgcggggacacggtccgttataaaaaggtgcttgcaggggttctgctcgacctccaggggcgcgccttcgagtacctcaaggccctcgaagtgggcggcgccgagctggaacccatcgccgaattcatcgggaaacagctctgcgtgaaactccccgccgagtacgattcggcgctgctgcgcgccgtgttggaccgtccgatccgcgtctgcggcatggtccgcaacgagggcgagccgggcggcggcccgttctgggtcgggaaccccgacggcacggagtcgcttcagatcgccgagtcgagccagatcgcgcccgacgacctgccgctgatgcagtcggccacgcacttcaatccggtggacctcgtctgcggcgtgcgcgattcgaaggggtgcaagttcgatctgcgccggtacaccgatcccgcgacgggattcatctcgtcgaaatcctccggcggccgcgatctgcgcgcgcaggagcttccgggactctggaacggtgcgatggcgaagtggaacacggtcttcgtcgacgttcccgtcacgacattctctccggtgaaggtggtgcaggatcttctgcgcccccagcaccaataggtttaaggttttgcgggtgtctttcgcccgtcttgtccgggccggccggggaatgcgtttgtatctcccggccggcccggatcgtgtcgcgccgaagccggactgcccttattgcagatgcaggaccagtctgtcgagtccgaagaaacactccgtgaatccgggagccggggcgacggcctctatcgtcagcgtgtttccgcccttgcggatctgtccgttgccgaacgcaacctctttggcgatcagttccggggcatgtcccgggcctgcggcggccgccattgcggtgcggcgggcctgcggttatacatctgctccatttgtgccggaaatttgtcaaaataggataaattgctgttcagtatccccgattgtagataatcttttttatatttgtgcgttaaaaccgaaaaacaataatcaaaactaaataacgctatggaaaacaaacttcaacagttgacgcagaagctctacgacgaggggctggagaaagggcgcgccgaggccgacaagctggtggccgacgccaaggccgaggcccggaagatcgtcgccgaggcccgcgccgaggccgaagagatcgtcaaaaaggcggaggccaaggccgaggacgtttcgaagaacaccatgaccgagatttcgctggccggcaagcaggccgtcggcagaatcaagtcggagatcgcctcgctgatcatcgccaaggctacggcccggggcgtgaaggaggccgtcgtggacccggcgttcatcaaggagatgctcgtcgccgtagctaaaaactggaacggttccgattcgggcaaggtcgaattgcaggccctgctgcccgagggcgagcgcaagaaactcgacgcggcgttcgaggagagtgcgaaggagctgctcgccgccggtgtcgaggtgggctggtcgaaggaggtgaagaccggcttcaaggtgggcgccaaggagggcggctactacatttcgttcgccgacgccgacatcgaagcgctgttggcagagtacctgcgcgacaaggtgttccaactgttgttcaaggcgtaaggcatgtttgcgacccaatattattgtctggtagcctccctgaaggagtacgcgctcgacgccgacaccaagggcttcgacgcccgggccatcgtctccgggattctggaggaggtgaaccgcggcgacgcccgcgaggtgcggctcctgtacggctactacgactgtgagaatatcgccgccctgcgtgcggggcgctcggcgcacaatccgctgggcaacttcacgcgcgaggagctggcggaggagctgaaagctccgaagcggcttcccgaggcggttgcccgcgtggtgagggcctatgccgatcccgagggcgaggacgccgagacggtcgacacgtcgcggcgtttcgagaaggagctgttcggggcctactacgccgcctgcggaaaggccgggagccgcttcctgcgcgagtggtccgctttcgaccggaacctgcgcaacgtttcggcggccgtcacggcgcgcgccgcagggcgtgcggtcgaggaggtcgtcgtgggcggcggcgatgtcgccgaacagttgcagcgcagttctgcggccgatttcgggcttcggggcgaacttccctatatcgacgcggtgatcgcggcggtgaacgacgaggccaacctcgtggagaaggagcacaagatcgacctgatccgctggaacgaagccgcggagctggcgaccttcgactatttcgacgtcaacgccatcctttcctacctggtgcggatcaacatcgtcgcccgctggacgctgctcgacgctgcgcgcggccgcgagatgttcgcccgcctgcttgccgaactggacggcaaggagctgattaataaggaataaacaataaaaacatacaatgaaaactacaggacgtgtaaacggtatcatctccaacatcgtgatcgtcaaggccgacggacccgtgggtcagaacgagatctgctatgtctggacgggcgataccaaaatgatggccgaggtcatcaaggtcataggcgacgcggcctatgtccaggtttttgacagcacccgcggtctgaagatcggcgaccgggtcgaattcgagggtcacatgctcgaagtcacgctggctccgggccttttgtcgcgcaactacgacggtcttcagaacgacctcgaaaagatggacggtctgttcatcgcccgcggttcgatcaccgatccggtcgactacgatgccgagtgggaattttcgccgctggccaaggccggcgacaaggtcacggcggcgtcgtggctgggcgaggtgaaggagctgtgggtgatgcacaagatcatggttcccttcacgatgacggacagctatacggtcaagagcgtcgccgaggcgggcaaatacaagatcaccgacacgatggcagtcctgaccgacgccgaaggccgcgaccacgaggtgacgatggtgcagaaatggcccgtgaagcaggccgtgcgctgctatacggagaaaccccgcccgtcgcgcatcatggagaccggcgtgcgtccgatcgacaccttcaacccgatggccgagggcggtacgggctttatcccggggcctttcggcgcgggcaagaccgtgctccagcacgccatttcgaagcaggccgacgccgacgtgatcatcatggtggcgtgcggcgagcgcgccaacgaggtggtcgaaatcttcaaggagttccccgagctgatcgacccgcatacgggccatacgctcatggagcgcacgatcatcatctgcaacacgtcgaacatgcctgttgccgcgcgtgaggcgtcggtctatacgggtatgaccatcggcgaatactaccgctcgatgggcctcaaggtgctcgtgatggccgactcgacgtcgcgctgggcgcaggcgctgcgcgagatgtcgaaccgtctggaggagcttcccggtcaggacgccttcccgatggacctttcggcgatcatctcgaacttctactcgcgtgcgggactggtgaaactcgtcggcggccagaccggatcggtgacgttcctcggcacggtgtcgcctgcgggcggtaacctcaaggagccggtgaccgaatcgacgaagaaggccgcgcgttgtttctacgccctttcgcagggccgcgccgactcgaagcgctatccggccatcgacccgctggagtcctactcgaaatacctcgaataccccgaaatccgcgaatacctcgacgagcacatcgagaaggactgggtggacctggtctacgcgggcaagaccatcgtgcagcgcggcaaggaggccaacgaccagatcaacattctgggcgacgacggcgtgccggtggagtatcacgaacggttctggaaatcggagctgatcgacttcgtcatcctccagcaggacgctttcgatgacatcgacgccaactgcccgatggaacgccagcagatgatgtacaagatggtgttgggcatttgcaaccaggaatttgcgttcgccgacttcgaggcctgctcgcagttcttcaaggggctgatcaacctcttccgccagatgaactattcggagtggaagtcggagaagttcgagggctaccggaagcagatcgagcagtatgtgagtgaacaatccaaataagcgggagaaattatgacaacacgagcatttcagaagatatataccaagattgacaacatcaccaaggctaccgtgacgctccgcgccacgggcgtcggcaacgacgaactggccaccgtcggcggcaagctggcgcaggtggtgaagattatgggcgagaacgtcacgttgcagattttcgccggaaccgagggcctgtccaccgactccgaggtcgtcttccacggcgagcctcccaagctgcgcgtttcggacaacctcgcggggcgtttcttcaatgcctacggcgaaccgctcgagggcggcgagatcatcgagggcgaggcccgcgagatcggcggtccgacggtgaatcccttccggcgcatccagccttcggagctgattgccacgggcatcgccggcatcgacctgaacaatacgatcgtgacggggcagaagatccccttcttcgccgaccccgaccagccctacaacgccgtgatggccaacgtggccctgcgcgccaaggccgacaagatcatcctgggcggcatgggccttacgaacgacgactttctgtacttcaagtcggtcttcgagaacgccggcgcgctcgaccgcatcgtgtcgttcgtcaacacgaccgagaatccgcccgtggagcgtctgctcgttcccgacatggcgcttaccgccgccgagtacttcgccgtcgacaagggcgagaaggtgctggtgctgctcacggacatgaccttgtacgccgatgccctggccatcgtgtcgaaccgcatggaccagattccgtcgaaggactcgatgcccggttcgctgtattcggaccttgcgaagatctacgaaaaggccgtgcagctgcccaacggcggttcgatcacgatcatcgccgtgacgacgctttcgggcggcgacatcacgcacgccatccccgacaatacgggttacatcaccgagggccagttgttcctgcgcaacgactccgacacgggcaaggtgatcgtcgacccgttccgttcgctgtcgcgtctgaaacagctcgtcatcggcaagaagacccgcgaggaccatccgcaggtgatgaacgcctgcgtgcgcctctacgccgacgcggccaacgccaagaccaagctggagaacggcttcgacctctcggactacgacgagcgcaccctgaagttcgccttcgactactcggagaaactgctggccattgatatcaatatcgagatcaaccagatgctcgacaccgcatgggggcttttcgccaagtacttcacccgggaggaggtcgccatcaaggaggaacttatccaaaaatactggaaggaggcgtaacgcgcaatggcaatcaaattccaatataacaagacctcgctgggcgaactcggcaaacagctgaaaatgcgccagaaggccctccctacgatcaaaagtaaggagtcggccctgcgctccgaagtgaagaaggcgaaggactccgcaagcgactaccgtcgtcggctcgacgctctgaaggccgagtacgactacatggtgtcgctctggggagagtttgattgtgacctcctgcgcattgccgacgtcgatttgtcggtccagaaaatcgcgggtgtgcgcacgcccgtcctgcaggaagtgaaattcgaggagaaaccctacgatctgttctcctcgccggtgtggttcgccgacggagtcggcatcctcaagcgcatggcgcagctggggatcgagttcgaggtctacaaccggaagatggaactgctggaccatgcgcgccgcaaaaccactcaaaaggtgaacttgtacgaaaaggttcagatacccgggtacgaggacgccatacgtaagatcaaacgcttcatggaggacgaggagaacctctccaagtcggcccagaagatcgtgaaaaccaagcagcaggccgccggggagggcgcgatgttatgatagccagaatgtcaaaatacaactttgtgctctttgcggcgcagagtgaggatttcgtcgagaagctgcgcggcctcgggctggtggacatcaccaccgcgggttgggaaccctccgaggaggaccgccagttgctgctggacatcgagagccttgcgaaggccgcggagttcctgaagaacttccgcgccggggagcgctgcgacgctgccgccgcgccgttcgcttcgggcgaggaggcctatgcgcattacgccgccgcgcaccgcgaggccgcgacgctcaacgccgagatcgggcggctggaaaaagcggccgaggagctgcgtccctggggggcgttcgacgtggaggcgacgcggaaactcgccgcccggggcattgtcctgcgctatttcttcacccagcgcaacaccttcgacaagcagttggccgagtggtcggagcgctatacggtttcggaggtcagccgcaccgatgccatggtgtggttcgtcgtcgtggccaagcccggcgaggaggttacgctcgacgcgcaggagatgaagaccccgacgatggacattcgcgaggcggagcgccgcatcgccgaagccgaagggaaactccggaccctcgacgctgaattttcgcgtgcggccgcttcggaggccctgctcgcacagcacgcctgctcgctgaaggagcgtttgcagggcgtgcgggtgaaggctacggcgcaggaggccgccgacggtacgctggtcgtcatggagggctgggccgagaaggagacttccggtcgggtcgacgcccttttggaggagtaccccaacgtggtcttcctcaaatcggaccccacgcccgaggacgaaacgcccgtgaagctcaagaaccgttggttcgcgcatgtcttcgaactggtgggcgacatgtacgcccgcccgaaatacgggacgatggacctcacacccttcttcgctccgttctacatgctctttttcggcatctgtctcaacgacgccggctacggactgatcctgaccctgatggggtggtggatgctcgccaggaaccgaaagcccggcatgatgcgtcaggcggcgtggttcgccacgctgtgcggcgtgtcgaccgtcgcgttcggactgctgtgcggctcgttcttcggcatcaacatgaacacgtggttcccctcggtgaaattcctcgatttccagggacagttcttctccatcgcgctggttatcggcgtggtgcagattcttttcggcatgctgctcaacatctggatgaccgttcgctgtttcggtttcggccgtgcgctgggactgctggggtggttcatcatcctcgtctcgtgctgtctggccatgggccttccgatggcgggtctcgccattccgggctttacggccggatcggtggccttctatgcggcgctgggcgtcggcggcgtgctgatgctgcttctgaacaatccgaagcgcaatccgctcatcaacctcggcgcgggtttgtgggacctttacaacaacctcacgggactgttgagcgacgtgctgtcctatatccgtctgttcgccatcgggctttcgggcggtgtgctggcgctggtgttcaacacgctggcgtcgggattcgtgcccgaaggcgcgaacatcgtggtccggctgctgattatgattccgattctgctgatcggtcacggcatcaaccttttcatgtcgaccatctcgtcgttcgtgcacccgctgcgtctgacgttcgtcgagtttttcaagaacgccggtttcgaaatggccccgcgcaatttcgacccgattcgtaaaatgaacgatactaacgaataataacaattaaaaaaaactcaaaacattatggaaacaacagcattggtattggcttacgtcggcgtagcgctgatggtgggtctggcaggtgtcgcttcgtcgatcggtaccgcaattacgggtcaggccgcagtaggggccatgaagaagaacggcggcgctttcggcagctacatgattctttcggcgcttcccggttcgcagggtctctacggtttcgtctgcttcttcctggtgcagaagggtctgacggacccgacgatggtgcagggcgcggctatcttcggcgccggtctgctggtcggtctggtgaacatcgccgcttcgatctatcaggcaaaggtctgcgccaacggtatcgccgctatcggcaacggtcacgacgtgatgggtaagacgctgatcctcgcggctttccccgagctgtacgccatcctgacggtggccgccacctacctgatcgcaacgctcgacggcgtgaatctcttctgacggggcggaacgcccgtcaccggaaagggagaccctgcggggcctccctttttcgttgccgtcctgcggtcggggcgctctccgaatacgaaggaacggttgtcgtgggacaccacgacaaccgttccttcgggggatatgggtattacggccgaaccggcgctcgttccgtgactaccgtcctttgcggcgcgacgaggtgcgcaccttcgggcctttgccgcggggctcttccgtacggcgcgccgcggccccgggcagcagcaattcgaagtctaactggcgtttctgcaggtcggcgcgcttcacgcggatgcgtaccgggctgcccagcgtcatgcggatgcccgtcgagcggccgatgatttcgtaaagctgctcgtcgaaggtgaagaagtcgccctcgatgtcgcgcaggaacgacatgccctcgatgtgggtttcgtccagctcgacgtagacgccccattcggtaagccccgagatgtgtccctcgaactcctcgccgatgtgctctttcataaattcgaccatcttgtatttgatcgacgcgcgttccgcctcggcggccacgacctcgcggtccgaagcgcgtgcgcagaggtcttccagttccgttttgtcggccggcttgccgcccgcgaggtaacgcgccagcaggcggtggaccatcatgtcggggtagcggcggatcggcgacgtgaagtgcgtgtagtaggggaacgccagaccgtagtgtccgatgttgtcggtcgtgtaataggctttggccatcgagcgcacggccatcgtcgccacggcgttttcctccgtggttccctttatctgtttgaagagcttgttcagttccttggccacggcgcggcccttcgtagccttgaagatgtgcccgaagcggaggatgaactgccggaagcggtcgagtttctcctcgctcggggtgtcgtgcacgcggtagaccatcgtgcgctccgccgagcggccgctctcggtcctgcgtttgccgcagaactccgccacgcggcggttggccagcagcatgaactcctcgatcatctggttcgactccttctgctccttgaagtaaacgcctaacggtttgccgttctcgtcgaggcggaatttcacctcttcgcggtcgaacgagatcgcgccgttcctgaagcgctccttgcgcagcgcctgcgccagccggttgagcgtcagcacctcctcggcgtagtcgccgcgtcccgtttcgatgatctcctgcgcctcggcgtaggtgaaacggcggtcggagtggatcaccgtgcgtccgaaccactcttcgaggatgtcgaggttttcgttgagcgtgaacaccgccgagaagcagaggctcgtctcgtgggggcgcagcgaacacagctcgttcgaaagccgttcaggaagcatcggcacggtgcggtccaccagatagaccgacgtgccgcgctccacggcctcgtcgtcgattaccgagtggggccgcacgtaatgggtcacgtcggcgatatgcacgcccacttcccagacgccgtcctttattttgcgcaccgacagcgcgtcgtcgaagtccttggcgtccgcagggtcgaccgtgaaggtcgtgacaccccggaagtcgcgccgctgggcgatctctttggccgtgacgcgggcgtcgatggcctgggcggcctcctcgatttcgggttcgaagcggtagggaagctcgtattccgccaggatcgagtgcatctccgtgtcgttgttgcccgccatgcccagccgctcgaccagttcgcccacggggcttttgctgcccgggagccagtcggcgatgcgcaccacgaccttctcgccgtcgcgcacgtcgggataggtgcgcttcgagagataaatgtccatcggcatgcggcgcgagtcggcccgtacgaaaatctggtgcgccccgacttcggccacgcccacgtagggcttgcggttgcgttcgatgatccgcgtgatctcgccctccagctgtccgttgcggccgcggtgcatcaccacgacctcgacgcggtcgccgttcagggcgttcgcggcgttgcgctggttgacgaagatgtcgctctcctgcccttcgaccttcacatagaccgaacccgagggggccatgtcggccacgccctcgtagtggggcaggtgggtctgcatcagacggtatttttcgcgcgcgcactcctcgacgactccctcttcgaagaggcgtccgaggatttctaacgtttcgcggcggccctctttcgtggcgcctccggaagccgaagccaggtgcttcagcgagaacttattgttggggaattcccggaacatgctcaatatgatcgaggtgcggtccgtcttccgtgctccgttttcggagcgttgtttctgttttttcatcatttcttaaaaatttgcagggcttcggtcctccgtcggatttccgttgtgcccgttttgccgctgtcgcggccggcctgtgtgcgttttgcggaaccgggcgttatttttccaggagttgcagggccagtttccgcatgtaggcgatgcccacgccgatagccgcttcgtcggggaagaatgtcgccgtgtgcgggcgtccggccgcagcgcccacgcccagccggtagaacagcgacgggtattgcttgcagtagaacccgaaatcctcggccgtggtgcgcaggggcagcatctcgaccttcagcttctcggctttggccagggccgtggcctgcttcacgaggatctcgtcgttgacgacgcacggatagccgcggccgatcgtcacttcggtcttcacgccgtgccgggcgtcgatgtccgcggcgatgatctcgatgcggcggtggatgatgccgcgctcgcgttcgtcgaacgtgcgcagcgttccctccatgtagatctcgtcgggcacgatgttcgtcgcgcccccggcctccacgcggccgatcgagagcacgcactcctcgccgttgagcgcgatgaggcgcgtcagcagttcggcgccggccgccacggggtccttgagctgcttgcgcatggcgccgtgcccgcccgtgccgcggacgcggaagcgcagttcgtcgcttgccgccatgtactttccggcccggaatccgagggtcccgacttccagctgcggttcgacgtgttcgccgacgacggcccgcacgtcgtagccctcgaacggcttttcggccagcaccagcgaggctccgcccgggttgcactcctcgcccggctggaacagcccgaagagcgtgccccggaaatcgggcgcctcggcgaaggttttcagcacgccgaacagcaccgcggcgtgcatgtcgtggccgcaggcgtgcatcacgccctcgttctgcgatctccactcgcagtcgttccgctccgtgacgggcagggcgtcgatgtcggcgcgcagcaccgcggcgcgccggtcgccttcgggggtcttgcggcccttgatgcgggccacgacgcccgtcgatgcgatccggcggtgttcgatgcccagttcgtcgagctgctgttcgatgaacgccgccgtgtcgtgttccttgaacgacagttcggggtgcgcatgcaggcggcggcggaattcgacaggttccattgattctctgttttatcggtttgggtcagaaaaccgccttgacgattttctgtatgttcgtcgtgcggctcatcgtgtagtagtgcagcacgggcacgcctgcggccatcagttcgcggctttgggcgatggcccactcggttcccacttcgcgcacgccgtcgggatgcgccttgacttcgcgcacgagttcctcgggcagcttcacgccgaacgtttcgggcagtatttccaggtggcgcagcgtcgagaggggcttgatgccggggatgatcggcacggtgatccccgcttcgcggcagcggcgcacgaagtcgaagtatttggcattgtcgaagaacatctgcgtgatgacatattccgccccggcgtcgaccttgtcgcgcaggcgggcgatgtccgaggtgatgtcgcgcgcctcggcgtgcacctcgggatagcccgccacgccgatcgagaatttcgagtggtggcactcctcgacctcgccgtcgatgaattttccgcggttcatgtcggcgatctgccgcacgaggtccacggcgtgggcgtggccctgcggatggggcatgaaacgcttttcgttctgcgacttgtctccgcgcagcgccagcacgttgtgcaggcccaggaagtccatgtcgatcagcgtgtcctcgatgtcgtatttcgacagtccgccgcagatcaggtgcgggaccacctccacgccgtagcggttctggatggccgccgagatgcccaccgtcccggggcggcggcgcacgacgtgccattcgacgctgccgtcctcgcgctcggtctccttgattccctcgcggtggaaggtgatgttgacgtaagccgggtcgagggccatcagcggctccacggcggcgaatatcttctgcatgccgtcgcccttgagcggcgggagcagttcgaacgcgaagcgggtgcgcccggaggcgatcgcttcgttgatgatctctacgacgttcatacgttgttcggtataatcttttttacggtttcggcctccattccgcggcggcgtgcgtagtcgagcagctgttcggcgccgatggtcccgaccgaaaagtagtcggcgtcggagaacatcagtccgcacagcgcctccccggggtcgatcatccagttttcggtcagccgcattccggtcgtcacctcgaccgcgagcaggtcgaagacctcgcgtttgagcgaatggtcgggcgaggccgggtagccgaaggccatgcggcggccgcggtactggccgcggactgcctgctcgggggtgggcggcgtgcccgtttcgtagccccacatctcgcgccgcatgaaggcgtgcacggcctcggcgaaggcctccgtgaggcggtcggccagcagtttggccatgatggccgaatagtcgtcgcccccggcgcggaacttttccgccagctccttcagcccgatgccggccgtcagggcgaaacagccgatccagtcgccgtccggtgcgatgaagtccgccagcgacaggttctcctcgccgcgcgtctggttgcgcagcatcgggaggcgtttttcgcgccctttcgcgtccgtcaccagaatgtcgtcgccctcggagcgtgccgggaagatgcccgcgaccccttgcagcgtcagcagccgctcgtcgcggatgcgggccagcagggcctgggcgtcggcgaagaccttgcgcgcctcggcgcccttttcggggtggtcgagaatctcggggtaacgccccttgagtccccacgccgcgaagaagaaactccagtcgatgtacggttcggcgtcggccacgtcgaagtcggggaagaccatgcgccccgtatggagcggcacgacgggttcgtgctgcgccgcgccgcgccgcgccgcgcgcgcttcggcgatcggaatgaggtcgcgctcccgcagccggcgggcgtactcctcgcgcagggcctgctggtcggctttcaccttgtcggcgtaaaggtcgccgtcggggccgagcagctgcgccagtatctggctgttgcggctggcgttcgcggagtggaccgccacgcccgaataaaccggggcgatcttcaccgccgtgtggaggtccgaggtcgtcgcgccgccgatgatgaccggaatgcgcagcccccgccgttccagctcctcgcagacgcgggccatttcgtcgagcgacggggtgatcagcccgctcaggcagatgcactgcgcgccccacgccaccgcctcctcgacgatgcgttccggctcgaccatcacgcccaggtcccggatttcgtaaccgttgcaggccatcacgaccgccacgatgttcttgccgatgtcgtgcacgtcgcctttcacggtggcgatcagcactttccccgaattatgcgcattcgcggccgacccctgttcgatatagggcgtcagcgccgccaccgcgcgtttcatcacgcgggcggtcttcaccacttgcggcaggaacatcttgccctcgccgaacagcgtgccgacctgctccatggcaggcatcagcagcgtgtcgatcacggccatcgggcttcccagcgcctcgtaaccctccagcgcatcctgctccacgtagtcggccacgcccttgagcatcgcatgggcgatacgctctccgagcgtccccgcacgccatgcgtcgggggcctgcggctgcgcctgggccgtctgctgcaccccgtgggcatactccgcgagccgctccgcggcgtcggcccggcggcagaggatcacgtcctcgacgcggcagagcagttcgggttcgatctggctgtacactttgagcatctgcgggttgacgatgcccatgtccattccggcccggatggcgtggtagaggaacgccgagtgcatcgcctcgcgcaccgtgttgttgccgcggaaggcgaacgaaaggttcgacacgccgcccgagaccttcgcatggggaaggtgctccttgatccagcgcgtcgcgtcgatgaacgccttggcgtagccgtcgtgctccgcaatgcccgttgcgacggccagcacgttggggtcgaaaatgatgtcttcgggcggaaatccgttgtccgtcaatagcttgtatgccctctccgcaacctctgctttacgttcgaaggtgtcggcctggccccgctcgtcgaagagcatcaccacggccgaagcgccgaagcggtggatctccgcggcccggcgcaggaattccgcttcgccctccttgagcgagatggagttgaccaccgacttaccctgcgtcacttcaagtcccgcttgaagtacctcccatttcgacgagtcgatcatcaccggcacgcgggcgatctccggctccgaggccatcaggttgaggaacgtgcgcatcgccgccggaccgtcgatcagcccgtcgtccatgcagacgtcgacgatctgcgccccggcgtcgacctgtgcgcgggccaccgagagcgcctcttcgtagttggcttcgcggatcagccttgcgaaacgggccgatccggcgacgttcgtgcgttcgccgacgttgatgaagttggcttcggggacgatccgcagcggctccagaccgctcaaggtcgtgatgtgcttcggcgcgggaacgggccgcggggcgtagtctccggatattttcgacaattcgaatatgtgggcgggcgtcgtgccgcagcagccgcccacgatgttcaccagtccgcgacgcatatactcgccgacatccccggcgaacatttcgggcgtctcgtcgtaaccgcccatcacgttgggaagccctgcgttcgggtgcgccgagatgcgcgttccggccactgccgccagccgttcgaggtagggcagcagctgcttggccccgtaggcgcaattcagtccgaccgacagcaggttcgcatgcgacaccgagacggcgaaggcctcgacggtctgccccgagagggtgcggccgctggcgtcggcgagcgttccggagaccatcacggggatcgcgcggcccagccgctcgcagagcgtgtcgatggcccagagggccgccttggcgttgagcgtgtcgaaaacggtctccaccagcaggatgtccgccccgccgtccaccagtccccgcacctgatccgtatacgctgcgaccagttgtgcgaaggtcacctcgcgggccgcgggattctgtacgtcggccgacatcgaggccgtgcggttcgtgggacccaccgatcccgccacgaaacgcggcttctgcgggttgcgggccgtgaactcgtcggccgcgctgcgtgcgattccggctgcggccttcgaaatctcgtaagcgcactcttcgagccggtagtcggccagcgacacggcgttggcgttgaatgagtcggtttcgatgatgtcggctcccgcccgcaggtatttttcgtgaatctcgcgcaccacgtccgggcgggtcagcgcgagcaggtcgttgcagcccttgagctgcaccggccagccggcgaaccgccggccgcggtagtcctcctcttgcagtccgtagccctgcaccatcgtgccgaagcctccgtcgagcagcaggatgcggcgctccagttggtcgtatagcgttgtcgtcatttatttttcggtaatttctatttcgtagagtttcggccagtttttgcccgtcacgaagatgcggtccccctcggcgtcataggcgatgccgttcagcacgtcggtcgtcgcggtcatttccgtttcgggcagcagccccgcgaggtcgacgacgccctcgacgacgcccgtcgcggggtcgatgacgacgatctggtcggtggtgtagacgttggcccatattttgtcgccgatccactccagttcgttgaggtattcgaccggcgcgcccttgtaggtcaccgtcacgcgcttttcgcggcggaacgtcgcgggatcgaccgtgtggatcgtggccgtgccgtccgacatgtagagcttctcgccgtcggtcgtgaggccccagccttcacccggatagcggaagtcgcggatcttttgcagtttcccgttctccagcgaatatacgtgcgcggtgttggactgccaggtcagctggtagagcttcccgccgagcagggtgattccttcgccgaactccgaacggggcaggcgcgccatgacctcggttttccccgtcgcgagatcggtcttccgaacgaccgattcgccgtgctggcccgtaccttcccacatcgtcccgtcgacgtattgcagcccctgggtgtaggcgccggtcgagtgggggtaggtcgccgcgatgcggtaggtgtacgttttcggctcggcctgcacggccgccgcggcctgcgcctttgcgccggggcgtttggcgcgcgccgccggaccgccgcatgcgcccagcagcaggatggaaaacaggaatatcggggtcgttttcattgtttcggaacaaaatagctcacaaagatacgaaaaagtcggatgggatcaaaacggaattgcgtgcggttcggtaaaacctttcggctggcaaaaggggcgttgcgactccaaaggctgcggaaaagtcggatgggatcaaaacggaattgcgtgcggttcggtaaaacctttcggctggcaaaaggggcgttgcgactccaaaggctgcggaaaagtcggatgggatcaaaacggaattgcgtgcggttcggtaaaacctttcggctggcaaaaggggcgttgcggccccaaaggtacgaaaaacaaaccgtatatcataatttgaccgtattattacgggtaatgtcttgccggaaatggaataatttcgtatctttgcctcccgattctgaacggaaatacgaagaataacaaatataattcattcattatgaacattgtaagagaacaacgcggcgagaataactcgctgatccgcgtgactgtcggcgaggcggattacgggcaggaggtcgaaaagtccctgcgcgagtacaagcgcaaggccaacatccccggattccgtccgggcatggtccccatgggcatcgtcaagaagatgtacggcaagggcgtcctggccgagcagtcctaccgtcaggcttcgaacgccgttttcgaatatctccagaaggagggcatcgactatctgggcgacgtgattcccgcggaggagcagggcgacttcgatttcgacaacgccaccgagttcgaattcgtgttcgagatcggcgaggctcccgagatcaagctggagctttccgacaaggataagctgacctacaacaagatcaaggtcgacaagaagatgcacgacgactaccgttcgaactacctgcgccgcttcggccgcctggtggacgctgagaaggtgacttcggacgaggcgctgtcggtgacgctcgacaacggcgagatgaacgttgcggacgcttacgtgggtctgatctcgatggatgaggccgatcgcaagcctttcatcggcaagaaggtcggcgacaagatgaaggtgaatatcaacgaactctataaaaatcccgcccagcgcgccgcctgcctgcaggtcaaggagaacgaactggagggcgtcaaccccgaattcgaactggagatcaccaaaatccgcaagttcgccgagccggagctgaacgaggagttcttcaagatggctttcccgcagggcggcgtcacggacgaagccgggctggacaagttcatcgacgcgcagatcgaggccgagctgcgccgagagagcgactacctcttcacgttgcaggtgcgcgactatctcgtgaagaaggccgacctgaagatgcccgcggcgttcctcaagcgctggctctacacgatcaacgagggcaagttctcgatggaggacatcgagaaggatttcgaccagttcctgaagatgttcacttggaactacctccagaagcacttcatcaagaccgacggcatctccgtttcgaaggaggaggcgctctccgaagccaaggcgctggccgcctcgcagttcgcacagtacggcatgccctcggcgccggacgacatgctggagggttacgccgagaagattctcgccgacaaggatcagggccagaagatttacgagaagctctatgaggtgaaggtcgtcgaggatgtcaaatcgaaggtcaaggtaactgaaaaagccgtatctgcggacgatttcgctaaattggcgaaggaactttaagtttcgcggaattttatctatctttggactttgcaggcgtgatgtttgcaaagtcctttgtgctttaagaacgcgcttttaggggcggctgtgggttttcacgcttcccatccggttctgcgctcccgtccgcccgcctgggaggcggctttcgggagcgacgggggccggatcgcttgcggcggttttcgcgcccgctttaagaagcgggtttcgggggcgatggggaatccggaatgcttccggcggcttgtgcgctcctgaccggcagaaggcagaatatgaagagtaaataaatacgactatgtcagaatttgaaaaatacgcacggaaccactgcgggatcagttcgctgaaactgcacgatttccagtcggtaagcgcggcctacgtgtcgcctacgatcatcgaggagcgtcagctgaacatcgccacgatggacgttttctcgcgcctgatgatggaccgcatcatcttcctcggcgcgccgatctacgacgacgcggccaatatcatccaggcccagctgctgttcctcgaatcggtcgatcccgagaaggacattcagatctacatcaactcgcccggcgggtcggtttcggccggactgggcatttacgacaccatgcagctggtgaactccgacgtggcgaccatctgcacggggcttgccgcctcgatgggcgccgtgctgctcacggcgggcgccaagggcaagcgttcggcgctcccgcattcgcgggtgatgattcaccagccgctgggcggcgcgcagggtcaggcctcggacatcgagatcacggcgcgcgagattctgaaaaccaagcgcgagctgtacgaaatcctctcggtccactcgggcgtcccggtcaagaagatcgagaaggacgccgaccgcgactactggctgtcggcccgcgaggcgaaggattacggactgatcgacgaggtgctttccaaacgagacaagtaaaccgcatggcacagaataagaacaacaacaagaacggcggcgactgctgctcgttctgcggcgccaagcgcacggacgtggagatcatgttccagggttcggacggcgcgaatatctgtaacaaatgtatcgagaacggctataagatcatcgtcgacaacgacatcgcctccgaacggggacggcgtccggcggcggctccgctcaagatggaggaactgctcaagccggcgcagatcaaggagttcctcgaccagtatgtcatcgggcaggatgccgccaagcggtatatgtccgtggcggtctacaaccactacaagcggctgctgtacgccccgaaggaggacgaggtcgagatcgacaagtcgaacatcgtgctggtcggtccgacgggcacgggcaagacgctgatggcccgcacgatcgccaagctgctgaaagtgccgttcacgatcgtcgacgcgaccgttctgaccgaggcgggatatgtgggcgaggatgtcgagagcattctctcgcggctgttgcaggtcgccgactacaacgtcgagcaggccgagcgcggcatcgtcttcatcgacgagatcgacaagatcgcgcgcaagggcgacaacccctccatcacgcgcgacgtttcgggcgagggcgtgcagcaggccctgctgaaaatcctcgaaggaacggtggtcaacgtgcctccccagggcggccgcaagcaccccgagcagaaattcatccaggtcgacacgcgcaacatcctcttcatctgcggcggtgcgttcgacggcatcgagaagaagatcgcccagcggctgaacacccgcgcgatgggttacgggcggctgaacgcagatcccatcgaccgctcgaacctgatgcagtacgtcacgccgcaggacctcaagtcgttcggactgattcccgaactggtgggacgtctcccggtgctgacctacatgcagccgctggagcgcgcggccctgcgttcgatcctcaccgagccgaagaacgccatcgtcaagcagtacaagcgtctgttcgaactcgacggcgtgaaactcgccttcgacgacgacgcgctggactacatcgtcgacaaggccgtcgagttcaagctcggcgcgcgcggcctgcgctcgatctgcgaggcgattatgatggacacgatgttcgacatcccctcgaccgatgcccgaaagttcaccgtcactttgccttatgcaaagaaaaagatagaaaaggcaaatattttggaacttaaacaagtcggctaatttctttttggctatctttgtcggaaataaacagctaaaacgcataaaatactaactccatgtctacaacgaattcaaaacttacgcgcgttgccgataatatccgcatcctttcggccgcgatggtcgagaaggccaagtcggggcatcccggcggcgctatgggcggcgcggatttcatcacggtgctcttcaccgagttcctgcgttacgaccccgataatatggcgtatccctaccgcgaccgtttcttcctcgatccgggccacatgtcgccgatgctctatgcgacgctctcgctggccgggcactattcgaccgaagatctgcaatcgctgcgccagtggggcagcgtgacgccggggcacccggaggtggacgtgatgcgcggcgtggagaatacgtcgggaccgttgggacagggccacgccatggcgctgggagccgccattgcggaacgcttcatggccgcccgtttcggcgagtggatggcgcacaagacctatgcctatatttcggacggcgccgtcgaggaggagatttcgcagggcgtgggccgcatcgccggccatctgggcctgtcgaacttcgtgatgtactacgattcgaacaacattcagctctcgacgaaggtcgacgaggtgatgaccgagaacgtggccatgaagtacgaggcgtggggctggaacgtgctgtcgatcgacgggcacaacatcaatgagatccgcgaggcgctggtcgccgccgagagcgagaccgagcgtccgacgctcatcatcggccataccgtcatgggcaagggcgccaaaggccccgccggagagagtttcgaaaacaaagtctcgacccacggccagccgctgacggccgccggggccgatttcgccgctacggtgaagaacctgggcggcgatgcggagaatccgttcgccgtcttcgaggagagccgcgaggtcttcgccgaacgtcgcgaggcgttgaaggagtgggccgcgaagcaggccgccgtcgagaagtcgtggcgcgcggagcataaggagctggcgcgcaaactcgacgatttcctttcgggcaaacttcccgaaatcgactacaagtccatcgagatgaaggccgacgtggctacgcgcgccgcatcggcgacggtgctgggcgtcttcgccgagaagatcgacaacatgatcgtggcttcggccgacctgtcgaattcggacaagaccgacggttacctgaagaagaccaaggcgttcacgaagggcgatttcagtgggaaattcttccaggcgggcgtctcggagctgacgatggcctgcgttgcgaacggcatggcgctgcacggcggcgtgatccccgtctgcggcacgttcttcgtcttctccgattatatgaagcccgccgtgcgcctctcggcgctgatgcgcctgcatgtggtctacgtctggacgcacgactcgttccgcgtgggcgaggacggcccgacgcaccagcctgtggagcacgaggcgcagatccgcctgatggagcacctgcgcaaccaccacgacgagcgttcgatgctcgtgctgcgtccggccgacggcgatgagaccgtcatggcgtggaaactggccgtcgaggagcaccgccctgtggcgctcgtgctgtcgcgccagaacatcaagaccctgccgacgctgggcgccatccgccgcgaggaggccgcgcaggtcgccaagggcggttatgtggtgatggatgccgccaaacccgccgcggtgctgatcgccacgggttcggaggtcgcaacgctggtcgaaggcgccgaactgctggccgccgagggcattccggtccgtgtggtgaacgtcccgagcgaggggctgttccgcgaccagccccgttcgtaccaggagagcgtgctgcctgcgggcgttgcgcgctacggcatgacttcgggccttccggtcaatctccggggactggtgggcgagaacggcgtgatccacggtctcgaccatttcggctggtcggccccctacaaggtgctcgacgagaagttcggctacaacggggcaaccgtcgccgccgaagtgaagaagatgctcgggaaatagcggagaccgtccgggttcggcggcaacgattttcgagttgccgccgaagtgacctatatataaaatgtgcaggagccaccgcccgacgcggtggcttttgttttgcagattccgaaattatgcctatctttgcagtcccgtctgtcaagcggggaaatgtggaaagatttgactgattgcaaaccacaataaaaaatcgctaaaacagcacattttttattttcaacagccaatttttcccattttatacgtttaaccattaaaaatgtatgaaaatgggctttttatttacatcggaatcggtgtccgaaggacatcctgacaaggtttcggatcagatttccgacgcaatcctcgacgaattcctgcgccgcgacgccaactcgaaagtcgcctgcgaaaccctttgcaccacgggactcgtggtcgtggcgggtgaagtgcgctcggaggcgtatgtcgatgtgcagggcgtggcgcgccgcgtgatcaaccgcatcggctacacccggagcgactatcagttcgacggcaactcgtgcggcattctgtcggccattcacgaacagtcgtcggacatcaaccagggcgtcgtccgcgaagccgaggaggagcagggcgccggcgaccagggcatcatgttcggctacgcctgcaacgagacccgcgagatgatgcccgcgacgctgatcctgtcgcacgtgatcctcaaggagctggccgtcatccgccgcgaaggcgaggtgatgacctatctgcgtcccgactcgaagtcgcaggtcacgatcgagtacgacgagacgacgaacaagccgctgcgcgtgcatacgatcgtcgtctcgacgcagcacgacgagttcatcctctcgggcgagggccgcagcgagaaggaggcggaaaaacagatgcaggacaaaatccgcgaggacgtgcgcacgattctcattccgcgggtcaaggcgcgtctggagcgcgccggcgaccagctggccgcactgatcggcgacgactacatcctgcacgtgaaccccacgggcaagttcgtgatcggagggcctcacggagacacgggacttacgggccgcaagatcatcgtcgacacctacggcggccgcggcgcgcacggcggcggcgccttttcgggcaaggactcgtccaaagtggaccgttcggcggcctatgctgcgcgccacatcgccaagaacctcgtggcggcgggcgtcgccgaccagattctggtcgagttgagctacgccatcggcatcgcgcagccgctgtcgatctacgtcgatacctacaattcaccccgtcccgcggcgttggccggcatgaccgacggcgagatcgcccgccgcatcgggaagctcttcgacctgcgtcccgcggccatcgtgaagcgtttcggcctgaaaaacccgatcttcgaggcgacggcctcctacgggcatttcggcaatcgtccttacacgaaggtggagaaggtctgggaaaacggcgtcgagaccgagcgcgaaatcgagttcttcggctgggagaaacttgatgccgtggagcagatcaagcgggagttcggcctttagcgtccggatacgctgaaaaatcggggcgtccgcgcaggatgtcccgatttttgtgcgaaaaggacatactaaccggacgttattgtgcgtttgtccttcgaaattgaaatttaaacgtacagcttatgtaatgaagttgcctctgattaatagaaccaaaacatttaattcattatgaaaaaggcatttttgattttaggactcgtagccgtgtcggccgcagccggcggacttacggcttggacggtttccgcggaccgcggaggttccgtcgcatacatcgagcgcgaggtggaacgtacgcccgcgctgggaacccagtttacgtcttaccaggccgagcagtatcccgacctcacctacgccgccgagaatgcggtgaaggccgtcgtgaacatcgaggccatccagcaggtcgagatgccccagcgccggggctacgatccgtttctggagttcttcggaatcccgcaggattacggccgcggcgacggaggtccgcagtaccgcgagcagcgggccggcggttcgggcgtgattatttcggaggacggctatgtcgtgacgaacaaccacgtcgtggacggggcttcgaaactcaaggtgaagctcaacgacgggcgttcgttcgacgccaaactcatcggcaaggattcggcgacggacctcgcgctgctgaaggtcgaggccaaggggctgcctacgctggctttcggatcgtccgatgcgctgcgtctgggcgaatgggtgctggcgatcggttcgccgttcgacttgcagtcgaccatcacggccggcatcgtgagcgccaaggcgcggcagctgggagccattcccaacgatttcaggatcgagtcgttcatccagaccgacgcggcggtgaaccccggcaactcgggcggtgcgctggtcaacacccacggcgagctggtgggcattaacacgctgatcaagtcgcagacgggaagctacgtgggctattcgttcgccattcccgagtcgatcgtccgcaaggtggtggtcgatctgaaggagttcggcgtcgtgcagcgcgccctgctgggcgtacagttccgcgtcgtggatcaggatttcctcgatacggagggtaaagagttgggcatcaaggatctgggcggcgcctacgtggccgcagttgtcgagggcggagccgcttcggaggccggaatccgcaagggagacgtgattctggacattgatggcgtgaaaattgttgagccttcgacgcttcaggagcagatcgccaaacgccgacccaacgatacggttaaattatccgtaaaaagagacggaaaggtgaaacaatttgacgttactttgcgtaataaagcaggtaaaacggaattggttaccaaggaggacgtcgatgttgtcgatgcgctcggaggtaagttcgccgatgcgggcgccaaactgtgccgcgaacttgacatcaagggcggcgtgcaggtggtcggcatcaaggccgacggaattctggcccgcgcccgtgttaaacagggatttgtgatcactcacatcaacgaccgcccggtctattcgctcggcgacatgcagcggatgacggagaaggtccgttcgatcgacggcgtttatcccaacggccgttcggcaagctacacgctggtggagtaaatcgcagcccgggcgggtttatggattgcagtattattaggatagttagaaaaaaatatgcgtcaattaaagattacaaagtccatcaccaaccgcgaaagcgcctcgctggacaagtacttgcaggaaatcggcaaggaggagcttatcacggtcgaggaggaggtggaactcgcccagcgaattaaaaaaggagaccaggaagcgcttgagaagctcaccaaagccaacctgcgtttcgtggtgtccgtcgccaaacaataccagaatcagggattgagcctcccggacctgatcaacgagggcaacctcgggctgatcaaggccgccgagaagttcgacgagacccgcggtttcaagttcatctcctatgccgtgtggtggattcgtcagtcgattctccaggctttggccgagcagtcgcgcatcgtgcgtctgccgctcaaccaggtgggttcgctgaacaagatcaacaaggcgttcgcacgcttcgagcaggagcacgagcgcacgccgtcgcccgaagagctggctacggaactggaactcccgaaggagaaggtcaccgacacgctgcgtgtcgccggccgccacgtatcggtcgacgctccgttcgccgacggtgaggacaactcgctgctggatgtgctggtgaatcccgattcgcccaatgccgaccgcgggctgatcaacgagtcgctgtcgaccgaggtggaccgtgcgctggagaccctcacggagcgtgagcgcgacatcatcaagtacttcttcggcatcggaacctcggagatgactctcgaggagatcggcgagaagttcgacctgacgcgcgagcgcgtgcgtcagatcaaggagaaggcgattcgccgcctccggcattcgtcgcggtcgaaactcctgaaatcctatctgggataaagtttatgggattagaaaaccggtcgtgttgtatacacgaccggttttttggtgtctaatcttcgttgatcggttgtggcttgccgttgcgcaggaaacttttcaggtcgggtagtgtgacgtagccgtacgacgttcccgaaatgtagagcgtatcgccgcaaatgcgtaggggcgtggtctctggatcgaatgggctccagaaaccgagcgtttgcgaactttttcgtccccgactggcttggatgtaattgtcgccttcgaccgagagaacgtggatcgaagtcttttccagttgtgtaatgagcgctttgcccgatgcttcggcccgtttgtactccttcaggattgccgcgctgttgccggcggtaaagagcaggtaggcagcaaatgccgtcgagaggattttattgcttgttttcatgacttttccgttttaaatagttgttgtggagagtctgcaggtcgttcatgtcaatgcccagttcgtccatgcgggcgaacatggtgtgcagttcgacccgaatgaattcgtgtcgctgggcttcgagtgtccgagcctgcgagccttcggcgacgaagaatcccatgccgcggcggataaggatcagtccgtcgcttccgagtttatcgtacgcccgcatcaccgtgttggggttgacttgtagtgtcacggcgagttcgcgtatcgaggggatgcgctcccgctcgggccaacggccggagacgatggcgcggcaggcgtggtcgtagatctggagccagatcggctggttgtcgttgaattgcatggccggattatttgagagttttttcccggagcttgaaatatccggtcacccagcttacgagagtccagtatccgaagatcatcgtgtaggcgccgtattccgggagttgcttccggagcggaaaagagagccttgcggtgtcggagtgtatgttgacagtgaattcggaaaagggaatgcggacgaataatccgtctgatggcatcagtacccagtagtagatgatgaagaataggatgaaagctccggcgagcagcaggaatattttcatcgggtattccttgccccagcaacaggccagcagcagcccggcctgcaccgtgaagatcgtcagccatgtaggatagatcatgattcggatgatgttgccgtcggggatgtctgccgcggctgtgacaggccacaagacgaggctgaaaagcagggtggcgataaccgttgtgttgaaccagatgaagaggtatttctccgccgccgtgacaggcagcgtgtaggagcgtaccatcggcagccgcttgtagaggttacggcagctcaagcgggtgacgtaatacatgaatcccaacatcgtgaagcaggcggttacgcggaattcccccggatcactgcgccatgatccgtaaaaccacgcgaagacagagagcagaatcagaattgccagcaggccgtagccgtagtagcgggcattttcaacgtaatgtttgcgtgcatataatacagtgcgccgaaaagagatggagttattcatgattggtgggatttgtgtgaagaatcgagggaatggtcatgcggtcgtgggtggtggctgcgaagatcagttcgaggtccggacggctttcccggccggtcgtattgagggcgatgccctcttcgcccgagaacgagggggtgctgtaaatcgctttcgcgtctgcgggcaacggcccaaacgtgaggcggtgcgacaattcttccgtggttgcggcgagcacaaggccctgttcgtcgaggatgacgattttgtcgatcaggttctcgacttcgcggacttgatgggtcgagatcacgatggtgcgtttctcgtcggcgtaggccgccaacaggctgcgtaggattgttttcgacgggatgtccagaccgttggtcggttcgtcgagtagcaggaactgtggattgcaggcgagtgcgaaggcgatgtagccttttttgcgctggcccatggacatgtcgtggggattttgtgacggatcgatttcgagtgcttcgcaatgactttcgaacatttctgctgaataaccggggtagaagacacctgtgtgtgaggcaaaacggcggagtggaatattcggcaggctcagttcttccgggatcagcatcagcctggacagaaaatccacgctccgctgccgcggggtgaatccatcgacggcaatgtgccctgtatcgggttcgagcagtccgcagataagttgcagcagcgtgcttttgccagtgccgttgcgtcccagcaggccgtggatgtgcccttcgccgaacgtcagcgagagatctgcgaaaaccttccggcgacggttgtaaccgaaagaaacgttttgaaaagcaatcatggctgttattgtttttgtgtattagtgtagtagtacactacaaatatagggcgataattttatattccaaattttttcggaattttaaaaaaaggaaatggctacgcgtcttaatggatcgtggcgtttttgtaaccgtgtgttcggtgggtctggggagcaggctccaacagcatgactgtgatcagaagtgcgagttgtctaattgggtgattctgttaaatgttgttaccacacgatcggctccttgcccacggagcggaggtattcgttggcgcgcgagaagtggcggcagccgaagaatccccggtagaccgacagcggcgaagggtgcacggctttgaggatcaggttgcgctgcgggtcggcgatggcgcctttcttctgggcgtagctgccccagagcatgtagacgatgccctctttgcgctgggcgatggcgcgcaccacggcgtcggtgaaggtctcccagccgcggccggcgtgcgacgcggcttcgtgggcgcggaccgtgagcacggcgttgagcagcagcactccctgttcggcccagcggtcgaggttgcccgtagacggtatgggcgtgccggtgtcgtcggagacctccttgaagatgttttgcagcgagggcgggaagggaactccgtccgcgaccgagaaacaaagcccgttggcctgtccgggaccgtgataggggtcctggccgatgacgaccactttcaggcggtcgaacgggcatttgtcgaaggcgcggaagatgttgctgccgcgcgggaaaatgcgccgcgaggcgtattcctgccgtacgaactccgtgagctgcgcgaaatagggtttttcgaactccggggcgaggagttccttccagtcgggggctatctttacatccatgttacgagcggttaaagtcgtgtaaatgtagtaaaaagttcccggaatgccgtgtttttgcggcggatttcggcgggcagggcaaaaaacgggcggcatccgctgaacttggggtggacgccgcccgtcgctgatggtaagaagggggttatttttgggttgcgccgtagcccacgacgaggattccgtcgcgactgccttggggcttttcaggccgttcggagaacttgtccccgctgccttggaggtaaaaatcgacgggcagcgtatatttcacgcgcaccttctctccgcgctgctcgccgggcgtccatgctccggcgggcgaggaggcgatcacgcggcgggcctcgtcggcaagcagtttgtcgggcgattgcaataccaggatattgcttaccgaaccgtccttttcgacgatgaacgagacgatgacacgtccctggatattgtttttcatcgcttcggccgggtattggatgtgcatctgtatccagttgcggaagtctttgatctcgccgctccggaacgaaggcatcttctcggtgaccaggaatggttcgttaccgtcgggagcgccctgcacggttgcgctttcggtctggggcaggcggaaatcgacgggcagcgtatatttcacgcgcaccttctctccgcgctgctcgccgggcgtccatgctccggcgggcgaggaggcgatcacgcggcgggcctcgtcggcaagcagtttgtcgggcgattgcaataccaggatgttgcttaccgaaccctccttttcgatggtgaacgtcacgaccacgcggccctgaatgttccgttccacggcctcggcggggtattggaggtgctcctgcacccacgcgcggaagtcgttgaggtcgccgccgcggaacgaaggcatcttttcgacgatcagaaacggcatgtcttccgtggacgcggaggcgatttcgaccgatccgggtttctcgttgaaaacggcttcgtcagccgccggtttggctgcgcctttggtggtgatcacgatcacgccgtttttaccccgcgaaccgtacactgcggtggaggactgatttttgaggacgctgatccgttcgatcgtattgggggcgatgtcgtcgatgctcgtccgctcgacgccgtcgacgatatagagcggtttggctttccgctccttttcggctcctgcggcgctttggggcgcgggcgttttttggtcgccgagggttacgctgacggggtcgagcttgttgctctcggtctccaaggtgatttcaaaactctctgcgccggatttgtcggagacgcggactttccgggtctggcagccgacgtaggagatgacaagttcattgccgggagccgctgaaatctgcgccgtgccctccttgccggtcacggttccgacgttcgatctgctgatcagtacgattgcgcccggaagcggctggccgttctggaagacggttacggagacttttttcttcgttgcgtcctgggacgccgtttcgtcggccggggccttttcggtttctgcaatccggacctcggcggcgcgcgtggtcagcgagaaagcgcacaggagtcctatcacggcgggaagcgttcccgccagccgcagcagggagtgcctgccggaagttttcgttgtcatcattttaaagcgttttttggttaaggaatcccgcagcccgttggctatttccggactataaccgaatagctgcctgaatatggttttcatgtaatgttcgatgtcgtacccttcggccagcacgtcgctgtcggcttcgaactcctcggcttcggtgagccgccgtgcggcgagccatacgaaggggttccaccacagcacggccttcatgcattccatcgccacgcgctcggcggagtggcggtgggcgacgtggctcgcctcatgggctacgatggcctgcaactctccggccgggatctggtcccagaggtagatcgagcggaagaacgagaacgacgcgatccgctgcggggtgcgcacgagcgtgaaacgctccgtgcgggtgatcgccgcaccgcgccgcagccggcggatgcgcacgacctgccacagcatgacgcccgcgaccagcccgaccccgatcaggtataccgccaggcatatcgcttcgggcgtgacggccggagccgcctcttcgaccacctcggcggtccattcggccgcgggcagtgcgaccgtcggggcgacctcgatcaccttgcccggccagacggggatgcgcagcagcggaatgaccgccgccaggagggtcgatgcgagcaggtaggccctgcaccagccgaaccgcacgtgccgttcgagcagtatggcgtaggccgccagcagcacgccgctgcaagccagcacttcgagggcgtagatggcgagggttttcacggcggttattttttggcgttgcgcatgatttcgagaatttcatccatctcccgggcggagatgttttcatggcgcgagaagaacgacaccagttgggccagcgagccgtcgaaatagctggaaagcatcgacgacatgacgccgcgggcatactcctcgcggccgatcagcggaaaatagcggtggctcttgccctcggccgtatggctgacgaagcccttgttctccagaatcttgagaaacgtggcgacggtggtgtacttggggtggggttcgtcggtccgggcgatgatgtcgttgaccaccgcgtcgcccagacgccagagaatctgcatgatctcctcctcgccgcgagtcagttccgtaatcttggtattcataggtcgtgttgtttcgggtttacgacacaatattactactaaatttttagtaaaacaaattttcgatctaaaaatttagtagataagcccgaaataattaatacctatgtttataagaaaggtggagaggcctggtcggagaggccggagctgggagcgagactatcgtagctgccgttcggcctcgttgtctttctcctccttgtcgtcctcctcccagtcgaaccacgggaattcgtgccggccgtccagcgcgaagcgcgtgtaggtgatcggaagtcccatttcgagaaagcgggtttcataagccgtcttgaccgaaagcacctcgtcggcgaaccccgaaccgtagatgtcgggttcggagacctcgcaagtcagcccgtaatggcggatgacctcgcccgtgtaggcgtagaggtgcttggagtcggtcttgaggttgatccacccgtcgggccggagcaggcgggcgtaacaggccaggtagagcggcgaggtgagacgtttcttggcccgccgggtcttgagctgcggatcggggaaggtgatccagatttcggacacttcgttttcggcgaacagcgcgtcgatgaactcgatgcgtgtgcgcaggaagcctacgttgtgcatcctgcggtccgtggcggtcttcgcgccgcgccacatgcgtgcgcccttgatgtcgatgccgatgtagttgcgctgcgggtcgcgctgagccagcgcgacggtgtattcgcccttgccgcagcccagttccagtacgatgggattgtcgttgcggaagaaatcacggttccagttccctttcagcgggtggtcgcggtggaacacctcgtcgaattcgggttgcacgaaacattcgaaagtcaggttctcgcggaacctgcggagcttgtctttgcccatagtggtctgttgttccgccggactgcggggccggcaggacggtaatgtgttttcggttatctgctttgctgcaggtcgacgccgacggcttcgaccccgcggacggggcggaccggcgtgaccgagcagcggtagtcgccgtgctgcgtgaggcggattcggcggcggtaggggatcgctgcctcgcgcatcagggccgcgggacctttcgggtgcgggatgacgagcaggaaccactccccgaagcggagcgaatcgggggttacggtggcgatgcggaccgtcaacgtgtcctccgcgaagcggtcgttgcagcgcaggaagatcacggcgtcgcgcagcgacacggtgtctgcgttcggcaggcggatttcggcccgcgagtcccaccgggcggggttgacgtcggtgaccgccgactggtggggcgagacgcagcttccggccagaagcgcggccgccacggccgcgatatgccctgccgagcgtttcaccgcgctattggttttgatgcgttccgccgttattgccgccttcgctgccgcctccgttgccgttattgccggccggggcgtttccgccgttgtttccgtttccgtttccgtttccgcggcggcggttgcggttgttgcggctgcggtttccgccctcacggccgcctccgttgttttcacggggttcgcggccgttgttctcgcggggttcacggctgttgttttcgcctcggttattgtcgccgcggccgttgtgcagacgctcgccgttgctgccgttgccgccgttctgacgctcccctccgttgcctccgttgcgcggacggtcgttgcggcgcggctgcctgtcgggacggccgggctgtccttcacgcggctggcgggtctctccgccggactcctgcggcgtctgtccgttctgccctgcggggcgtccctgctcgccgcggcccttgttgttgcggccgccgcgcttgcggcgtttggcctggtcgaagcgggtgatgctgtcctcctccgaacggtaggtcggctcctcgatctccgggcggatgtcgtcggcgtcctgcaaccgttcgaccttcttgccctggcggttcagcgccatgatctcccgcacgcgcgaaacgggcagcgtggtgacgttggccatcgcgtccttcgacgaagagaaggtcatcgttccggccagcacgtcgctcttgacgcagaaccattcgccttcggcagcctggagcggttcgcgcaggcgcgggaactccttgcgggcgtcgacataggtgtcgtattcgtacatcatgcagcacttgagcttcgagcactgcccggccagcttctgggggttgagcgaaatgtcctgcacgcgcgcggctccggtcgtgacgctcgaaaagctcgacatccacgacgcgcagcacagttcgcggccgcaggcgcccagtccgccgatgcgtccggcctcctggcgggcgccgatctgcttcatctcgatgcggatgtggaaccgttcggcgaagaccttgatcagttcgcggaagtccacgcgctcgtcggcgatgtagtagaagatggccttgatcttgtcgccctgatactccacgtcgccgattttcatgttcaggcccatgtcggcggcgatctgccgcgaggcgatcatcgtctcgtgctccagcgcgatggcctcctgccacttttcgatatcgtagggtttggccttgcggtagatcttcttgtattcgccgttgtaggggttgaatcccgtgcggcgcatctggcgcgccaccaggtcgcccgtgagcgacacgacgccgatgtcgtggcccggcgacgcttcgacggccacgatgtcgccccgtttgaggtcgaggttgttgacgttctggtagaacgaacggcgggtgttcttgaaacgcacctcgacgatgtcgctcggcatgttgaccgggtactcgtcgagccaggccgtttcgtggagcttgaagcacccgtcgcagagtttggcttccggctccgagccgcagttgcaaaaggcgcacccgcggcccacttcgggtttgcaggcgcccgtatgtcgtttttcggtatccatgattgggtataatttgcgtaaagatacaaaataattcacaattcagaattcagaattcacaattttggcttattcgggaactatgcctgcaaactgaatttatgaattgcgaattgtggattgtgaattcccgtttgcatgcaaacggctgatgctgcggcggatgcgcacgatcatcatcacggctgcggccgacagtccgaacgagaagcccaggaaaagccccgaaggacccatgcccatcgtgaaaccgaacaggtagcccgccgggaggttcagcagccagtaggagacgaaggcgatcggcatgatgatcttcacgtcctgaatgccccgcaggatacccaccgagacgttctggatgccgtccgacagttggtagagcgcagcgaagaccatcaggttcgaggcgatggcgatcacctcggcgttggtggtgaagaaggtcgggatcacgttgcgcatcgtgatgaaaaccagcgctgcgagggcgttccacgccagcacgaggtggtacgacgccttggccgcgagcgacagttggctgatgtcgcgcgcgccgtagcagtgcgacacgcggatggtggtggccgcgccgatcgacatgacgatcataaaggcgcagttgccgatggtcgtggcgatctggttggcgctcatcgtctccttgttgaaccaccccatcataattcccgtgccgacgaaggccgaggcttcgaggaacatctgcatcgagatcggcaggcccatgtgcagcagttgtctgaccgacgcccacgagtagttgcgcggcgaaaagccttcgagatagacgcggtatttgctgcggctgtaaaagtagccgatcatcagcatcggggcgatgatgcgcgacatcagcgtgcccaggcccgcgccctcggcgcccatctcgggaaatccgtagcggccgtagatgaacacccagttgaagccgatgttcgcgaggttggccgcgatcgtgacgaacatctcgaccttcgtgttgcccacgccttctaggaactgcttgaaggtgaagaacagcatgatgaacggcatgctccacaccagcatcctgtaataggggatggccatgtcgaccacttcggcgggctggccgaggtggtacatcagcggaatgacggcgtactgcacggcggccatcgccacgcccagcagtccgtagaagagaatgccgttctggagcagtcccgacgatttctcgcggtcgccctgcgcgtagagttcgcccacgagaggcgtcatgcccagtgcgatgccgatggcggcgatgaagaggatgaagaagacggcgccgccgaacgacacggcggccagcggcgtggggtcgctgcctccgtagcggccgaccatcaggttgtcggcgacctgcgtgaggatctgccccagctgtgtcagcaccacgggcagcgccagccgcaggttggctttgtattgctctttgtatgttgcgaaactgtacattcgattcgggtattgaggtgcaaagatagccatttccgccgggattgcaattcacaaacccctcccggggcggaaaaagcgccggaaggggctgcgaaagtgcccgcggtgcggatcagtagggcagttcgatgcggatgcagcagcccccgctgtattcggggcagacgcggatgtcgcccccgaggcgggtgacgatcaggcggcagaggtaaagcccgatgcccgaaccgggtttgaaggggtcgaccttggtgaagcgttcgaacacccactcctgcttttcgggcgggatgccgatgcccgtgtcgctgacgctgatttgcaacgtgcgccggggctcgtcgttgcggcaacggagcgtgatgcgtcctgcggcggtgaacttggcggcgttatgcagcaggttgtcgacgacgcgcgtcaggtagaaggcattggtgggtatctcgatctccgttcccgcttcgttgacgtattcgaccgccggattgtcgccgagctgcttttgcagctccagccgttcggcgcagagcaggcggatgtcggtctgggcgaccgggagcgggctttcggaactgacgagctgcgagagttcgagcatgttctccagcagggcggtcagggccgtggtgctcttccagatctcggcctgaaaagcctgccgggccgcaggcttctgttccgtgagcagcagttcggagaagccgttgatggcgttcagcggcgtgcgtatctcgtggcacatcgagttgatgaaggcggtcttcattttttcgctctcctgggcgcggcggctttggcgctgcgcctcttcgctggctgccatgaactgcgtgcgcgccagcttcagccgccggaccatcgcctgctggtaggcggcccagccggcgagcagcagcacgatgccgccggcgacaagcaggaagagtttgttgcggtcggccagccgggacttttcgagttcgaggcggttgacgtcgtagagcgcctgcatctcggccagcttgctctgcgcctggtccatgcggctgtggtagcggaagtcgttgcctttccgcatggcttcgagggcttttgcgtaatcgcccgccttttcatacaggtgcgactgcgctatgtagatggagccgagatccgcctttttgccggtctcggcgtagtgggtcagcagcgaatccatgtaggccgtgctccgctcgtagtcgcccctgtcccggtaataacgggcgctggtgttgtatatctcctcgcggtcgccgcgcccgcgcgccagctccatgcatttgtcgtagtagccgtccacctcctcccgggtgaggaggccgcccaggaagaccatcttgccgtaggaccgcatcaggtattccgccgagtcgcggcgggggcgttcgaaacgtttgtcggcagccacccacgcgcggtgcaggtcgatgcaccggccgatctgaccggcggcgcgcggatcgtcggcgtagagatagatgtctgcaagttcctcgcggcagagtttttcgaagtgaacgcgttcctccagcgggtatttttcgagcttggcgagagcctgctccacataggggatggcctggggaatgttgccgtaggcttcggtggcgatcgacgaatagtcgatggagagtcccgtgaggaattcccattcgatctcctcctcgggggtgaggctgcccggttgccgctcgcggaactccgcctgcgcgcggtcgatcgcctcgaacgagttggccaccgacatctgcttccagagccagaaggcgttgagcgatgcacggaacagcgcgaagcggcggtcgggcaggaggctgtccgcaaggcggacgtactccaaagcccgttcgggctgcttcgccgagaatccctgcacgagccggtccagcgcctcccggcatccgtagtcgtctccggctccggcggcttcggtgagtgcggcttcccagtagaggacggcgagcgccgtgctgtcggcgcagaggtcggccagccggacataggtctgctcccgttcggcgggcgtgcgcgcccgggacagcgctgcggacaggctgtcggcttcagtggttgctgcgaacgccgtcgtcgcggcgcagagggttataaacaaggccccggagagggttttcagagaaatcggacgcattcggtttctctgaagaggtatgaaatattcgcacaaatttaggaaaaatggaaaatatcgcatcctttcctgccggaaaaatgcgaaaaggggccgggaaacgatcccggtccctctctgcgagcggtcggttatgccacgcgcagttttacgccgcggcccttgtccgactccacgatcacggtgtcgccctcgtggagcttgccgtcgatgatcagcgtcgagagcggttcctcgacgttgtccatcagcgtccgcttgagcgaacgcacgccgtagcgcgactcgtagcccatggccgccagccggcgtttggccccttcggtgatcttcaccttgtagcccagcctgcccgtgcgggccatcagcccctgcaattccaggtcgacgatccgttccacgtcggcgatctccagcgtgcggaacagcacgatgtcgtcgatgcggttgaggaactccggggcgaaggtgtgctccagagccttgcagtactcgctctggggcgtccggtcggccacggcgctcttcgaggtggtgctgtaacccacctgcaccgatttccggaccacggcccgcgaacccacgttcgaggtcataatgatgatcgtgttccggaagtcgaccttgcgtcccgagccgtcggtgaggtgtccttcgtcgaagatctgcaacatggcgttgaagacctcgggatgggccttctcgatctcgtcgaagagcaccacggcgtagggctgacgacgcacggcctccgttaactggcctccttcgccgtaaccgacgtatcccgggggcgagccgatcaggcgcgccacgttgtgtttttcgccgtattcgctcatgtcgatccggatcagcccgcggcgctcgtcgaacagccatttcgacacctccttggccagcagcgtcttgccgacgcccgtgggcccgacgaagaggaagacgccgatggggcggttttcgtccttcagtccggcgcgcgaacggcggatggtgcgcgaaatcttctccacggcctcctgctgtcccacgacacgcttggcgaggtgttcgcgcagggtttgcagacggatcatctcgccgtccgagacgcgctccgcagggatgcccgtcatggcggtaatcacctcctggatatgccttgcggtgatctccacggggttgctttcgagcgagcgcttccattcggcgcggctctcgcccaacttcgagcgcagcgcgatttcccgcatgcgcgccgaggcggccttctcgtagaccagcgcctcgaccgcttcgcggcgttcgcgtttggcgtcgctgagcgccgtcttcatggcccgcagctcctccggttcgcgtgccgattgcaggtgcgcccgcgagccggcctcgtccagcgcgtcgatggccttgtcggggaaatagcggtcggtgacgtaacgcccggtgagcgtcacgcaggcctgcaacgcctcctcggtgtagtgcaccttgtggtggcgctcgtagtggggcgcgatgttgcgcaggatctggagcgtctgctcgggtgtcgtcggctcgatcaccaccttctggaagcggcgttcgagggccgagtcggtctcgatgttctcgcggtactcgtcgagcgtcgtggcgccgatggtttgcagttcgccgcgcgcgagggccggtttgaggatgttggccgtgtcgaggctgccctgcgtggagccggcgcccacgatggtgtgtatctcgtcgatgaagatgatcgtgtccttggctttgcgcagttcgtccagaagctgctgcatgcgctcctcgaactcgccgcggaacttcgtgcccgccacgagcgacgagacgtcgagcgagaagagcgttttgtcggcgatggtgtagggcacttcgccgcgcgcgatgcgcagcgccagcccttcgacgatggcgctcttgcccacgccggcctcgccgatcaggatcgggttgtttttcttgcggcgcgagaggatctgcaccacgcgttcgatctcctgctcgcggcctatgatcgggtcgatcttcccctcgcgggccagccgcgtaaggttcacgccgaacttgtccagcaggtgggccgggcctttctcctcgttcctgttctcctcgccgaagtcgagcatgtgaacctgcacttcggtgcggaagtcgtcgcccacggcgaatttttgcaggtctccggacacgctgtcggccgtcacgccgtacatctccagtacgcgcgcggtcgccgtcgaacggtcgctgatgatggccagcagcgcgtgggccgtcgacacgctccgggcgacgcccggcattgcgagcagttcctcggtgaagtcgcggtaatactcctcgggcgaccgggtctcctgctgtttggcgctgattacctcgcgttcgatgcgcaggcgcacctgataaagctcccagtccttgagccgggaggataaaagctggtaggcgagcgacccctcttcgcggagcagttccagcgtgaggaagtccttgagcgaatgcgtcattcccgccttcgtcgtgttgaatgccgaacgggcgatgatgccctccaacgttttcgaaatttttggttgcatgttgcgtcgtcgttatgaattcgccatactaacgagagcgcgtatgtgattattatgcggccgtttttgtttagtgtctgaactttggtggctgacgcagaggcctttccgtcggacgggcattttcggagcagccccaaggcatcgggtttaccggctgacttccaatatcttgcgggctttatcggagtgtttccggacggaaatgtatagaatcggcttttttatgacgcgacttgccggaatgtttcggatatttcgctgacgatcaccgaaatccgcccggaatgcatttccggccttttggggtataaaattttatttcgggtgattttgtgacggaaaaggctctcccggacagtcggttttagctctccgcccgccgggttttcagttgcggggccactcgccgacctccatgtcgcgcatctccgcgccgtcgatcgtaaggcgtacggccgtgcggaccttgtggaagccgaactccccggcggctccggggttgacatggagcaggtcgtagacgggatcgtagatgactttgaggatgtgggaatgcccggcgatgaagagtttcgggtgcacggactggattttctgcacggcgcgcgggtcgtaatggcggggataacctccgatgtgggtcatcagcacctgcacccgctcgcactcgaaggcctggaacgcgggatagacgcggcgggtcatgccgccgtcgatgttgccgctcacggcgcggagcggcttgaatgcggcgatccggtcggccagctcgatcgagccgatgtcgcccgcatgccagatttcgtccacgtctttcagaaattcgcggagcgtgtcgtcgaaggttccgtgggtgtcggatataatgccgatgcgtttcattggtacttctctttccacagctgcgccatccgttcggcgattttggcctcggcggcgttctgcgtgtcgggttcgtagaacttcgtgcccgaaaggctctcgggcaggaactcctgctcggcgaaatgccccgcgtagtcgtgggcgtatttatagcccttgccgtagcccgccttgtccatcaggcgggtcggggcgttgcgcaggtgcagcggcacgggacggttcgtggtgtcgcgctcgaccagcgacatcgccttgttgatggccatgtaggccgaattgctcttggggctggtggccaggtagatcgtcgtctcggccagcgtgatgcgcgcctcgggcatgccgatcttgtgcaccgtgtcgaagcaggcgttggccagcagcagggcgttgggattggccagcccgatgtcctccgaggccaggatcaccagacgccgggccaggaaccgcggctcctcgcccccggccagcatccgcgccagatagtagatcgcggcgttggggtcgctgccgcggaccgatttgatgaaggccgaaatgacatcgtagtgctgttcgccgttcttgtcgtagagggcgatgttctgctggaggcagtcggtgacgtaccggtcggtgatcgtcaccttgccgtcagtggccccgacgacgatttcgaggatgttgagcagcttgcgcgcgtcgccgcccgagaagcggaacagcgcgccggtttccgtgacctcgatgtcgcgctctttcagctcggtgtcggtcgtcagggcacggtcgagcaacgtttgcaggtccttgtcttcgagtgacttgaggatgtagacctgacagcggctcaagagcggcgagatcacctcgaacgaggggttttcggtcgtcgcgccgatgagcgtgaagacgccctgttcgacggcccctaacagcgaatcctgctgcgatttgttgaagcggtggatttcgtcgatgaacagcagcggggccttctggtcgaagaaccgctgcttgcgcgccgactcgatcacctcgcgcacgtccttcacgcccgacgtgacggccgagagggtgaagaacgggcgttccaactgcgtggcgacgatcttcgccagcgtggtcttgcccacgcccggaggtccccagaggatgaacgacgggacgttgcccgtctcgaagaacttgcggaacaccccgtttttgcccacgaggtgctcctgcccgatatattcgtctatcgtgcgggggcgcagtcgttcggctaaaggaatgttcggcatggcatgttcgatttattaggaacaaagataggaaattttcaaaaaataatcctatatttgtcgaacatactgacaaacacggaaagtgtaagtctgttcccgaatcgtgaacgtaggaaattcattgcaagagaggaataggcaaacatcttgccgcgtcgtatccgtattctgcgggtataggcgtgggagctgtcgcttattttatcttgcaaggtatcctacgacctacgattctgaaatgggcttcggcaccacgcttttcttttttgtttatgccgccggggtgcgggtggctgaaaagcctcgattatgaaaaagttattgctgacgatttgttcctcgttgttttgtgtgctgtcctatgcgcaaacggaacatttgacgttcaaaggtctgccgatagatggcagcaaacaggaatttgtgaaagaattgcagcgccaaggatatgtgtatgtagatgacgatattttatctggtacatttataggccgggatagttatgtttttatttatgatacacccattacgaataccgtatggcaagtcggggttttgttcaaatcgacatatgacacatggagcctcattaaaagaatatatgacgacttggtggatgtttacacgaaaaaatatggtgctcctatccttgatcagaaagagtttaagtcgccatggagagagggtgatggacatgagttatttgccttgcggtctgatcggtgtgtttatagaacggtgtttgtgtatataaaagataggatggatattggatgtgttgagattcgcatggcaaatgactgtcgaataataatattatacgaggatagtattaattctgatttgttaacaaaagagcgagctaatgaaatttgaatgaaaaaagagactgtcgtctatagacagcctcttttttttgttgcattctaatttattactcctccggcttgcgcagttgcagatacaactcgtcgagctgcgtctggtcgatgtagcccggggcgtcgagcatcacgtcgcggccggcgttgttcttcgggaaggcgatgtagtcgcggatcgactccgagccgccgaacaaagagcacagacggtcgaaaccgaacgcaaggccgccgtgagggggcgctccgtacttgaaggcgttcatcaggaagccgaagcgcttctgcgcctcctcgggcgtgaagcccagcagttcgaacatcttctcctgcaacttcgagtcgtggatacggatcgaaccgccgccgatctccgtgccgttgcagacgaagtcgtaggcgttggcgcgcacgcggcccgggtcgctgtcgaggtattgcacatcctcgagcttgggcgaggtgaaggggtggtgcacggcgtagtaacgctgcgtctcgtcgtcccactcgaacagcgggaagtccaccacccacagcggggcgaacttctgcgggtcgcgcagccccagctgctgggccacttcgaggcgcagggcgcacagctgcgtcagcgtcttgaacttcttgccgcagaggatgaagaccatgtccccggccacagcgccgcagcgctcggccatggcgcgcacctcctcgggggagtagaacttgtcgatcgacgacttcacgccgtcctccgcgacgcgaatccagacgaggcccttggcgccgatctgctgccgcttgacgaactccgtcagcgagtcgatctgcttgcgggtgtacgcggcacagcccgtggcggcgaatccggtgatgtattcggcctcgtcgaatacgctgaagccgtgccccttggcgaggtcggtgatctccgcgaactccatgccgaagcgcaggtcgggtttgtccgaaccgtatttctccatcgcctcgatccacggcatgcggcgcagcggctcggtcagctcgattcccatcacatgcctgaacatgtgcttggcccagcgctcgaagatttcgagcacgtcctcctgctcgacgaacgacatttcgcagtcgatctgcgtgaactcgggctggcggtcggcgcgcaggtcctcgtcgcggaagcagcgcacgatctggaaatacttgtcgtagccggcgaccatcagcagctgcttgagcgtctgcggcgattggggcagggcgtagaactggttgggcgacatgcggctcggcacgacgaagtcgcgcgctccttcgggcgtcgaacccaccaggcagggggtttcgatctcgaggaatccctcgtcggagaggaagcggcggatctcctgggccatcttgtggcgcagaatcatgttgcgttgcaggggcggacgccgcaggtcgaggtagcggtacttcatgcgcaggtcgtcgccgccgtccgagacctcttcgatggtgaaggggggcacttcggcttcgtgcaggatggccaccttctcggccgtgacctcgatgtcgcccgtcggcattttggggtttttcgactgccgctcgacgactttgccgacgacctggatgacccattcgcggcccacgcggcagaccgtttcgcgcgcctcggcgggggagtgttcctcgacgacgatctgggtgatgccgtagcggtccctcaagtcgatgaaggtcatggcgccgaggttcctcactttctgcacccatccggccagggtgacggtttggttgacgttgcaggcccggaggcagccgcaggtatgggttctgtacatggcgatatgttatgtttagtcgttacgatccgcaaagttaactaaaattcataattcataattcataattcataattaaatgacaggatgccttgttaaaacctttgtgtgtgaagaacgccgccgccggaattgcagcgaggcggatgaaacggcggatatgcagggaaaagagcgaaaagagatgcggaatccccgaaacgaacctcccgggaccgggcgtcgtttcggggatttgttgggcggcccggatttcggacagccgtttctgaccgataattactccaccgctttgagttcgagtacgcggctcgcatattccttgcccaccgtgaattcgagtccgttctccatcaggaacgcgccgctgaaggtcttgccgtcctgcgggaccggcttcccgtcgacgttcagttcggtgatccggtagcgtttgccggggtcgagacccgccatgcggaaggccggcgacggcatgttgaggaagtgctccagcttgtagacgaaccagacggcgcggtccttttcgggtgcgacgtacatcagcgatgcatagcctgtcttgtcgtagggcgagatcagccggtagaggtcgccctgctgcacgatgggacggatctccttgtagtcggcgatcgccctgcgtgcgaactccttctctttgccggtcatctttgagggttgcagttccagccccaggcgtcccgacatggccacgtcgaagcgcagtttgagcggaacgttgcggcccgtctggtggttgggcgaggcgctcacgtgcgaggccatcgccacggcgggatagaagttcgacacgccccattgcatgtagatgcgttgcagggcgtcggtgttgtccgaggtccagaattcatcgtagtagggcaggacgccatagttgacccggccgccgccgctggcgcacgactgcatcaccagacggggatatttctcctggatgcgccgcagcaccttgtccatgccgcggtggtactcgatgtagaggtgcgattgccggtcggccggcaggaaggtcgagccgtagttgtagagcgtcatgttgtcgtcccacttgatgtaggcgatgtcgggatgcgcggtcatcagacggtcgaccacgctgaagacgaactcctgcaccgcggggttcgacagatcgagcacctgctgcgtgccgccgcggcccttgcggttttcgcggtagggctgctggatcacccagtcgggatgcttctcatagagttcgctccgggtgttggtcatctcgggttcgatccagatgccgaacttcacgccgtgtttgcgggccgactcggtcagaccctcgatgccctgcggcagtttctcgcggcagaccgtccagtctccgaggctcgtctcgccgttgttgcgcgggtatttgtcgccgaaccagccgtcgtccatcacgaacagttcgccgcccaggtccgccaggtcggccatcatccggtccatgccttcctggttgaccttgaaatagacgccctcccacgagttgagcagcacgtcgcgaagctcggttccgtggttgagccggtggaggcgcgcccatcggtggatgttgcggctcacgccgctcttgccctcgtcgctgaacgtgaaggcgaataccggggtcgtgaagacctcgcggggttgcagcgtgtattgcgactgctcctcgttgatgcccgcgaagaggtgcgtggtgtgggtgttgtcgttgtccagggcgatgcggtagttgccggcccaggccagcgtgccgccgatgacgcggcctgtcaactcccgggggcgtccgtcgagcgagatcatcagcgaggggttgtcgcgctgcgtgttgcgtacgccgtccttgttcttgagcaccttcatgccgtcggtcagcggttcttcgtggaggtagcattccgctccccatgtgccgtggaaatgcgtcagccacgtgtcgccccggcggacgggcatgtaggccgatgcgaaccggtagagcgtcacgggtttcttctccgtgtggctgatctcggtccacgtctcgatcacctcgcagtcgtcgtaggtcttgtagaagagcgtcacgaaaaacgggtagtgcttgtccttcatggcgatggcggtggtttcggagccgtccctgcggtcgcgcgacaccgactcgacagccagttcgagcgacatcgaaccgtcgccgtgcgtcgcctgaatggctacttcgcggtaacactgggcgccgaactgcgggtaggccgcatcgccgaacgccgctccgctggcgaggatgtcgtcgggcgaggcgacgcgcgctccgaaatactggaacagaggggttttgcctttttctgccgtcagcagcagcgaggaattccgggtcgagaggaggatgttttccgcccggagcatgccgccggacagcaacgcagcgccggcccatgccaataccaaaagtttcttcattgcagggttgtcgtataaggttgatttcgggtataaaactaataaaaaaacgcggattccgcaaagaacgcaggccggacgattgtccggcctgcgaatccagaaatccgaaacggagcctccgcggttatttcggggccgtgacgaacggtgtctccagcagttttttcagcgtggcggggttgtcggtggtgatgtagtcgacacccagcgcgatgcaggccatcatgtcggccgtcgaattgaccgtccaggcgttgacctcgattccgccggcgtgggcttccgtcacccactcgggttttttcgaaagcacggtcgaatactggtagtcgatgcccgagagcttgtccgccgcgacttcggcaggagccttgtcgccgcccagatactgtacgccggccgcgggcatggccgcccggagctgcttgcagacctcgtagtcgaaggcgatgtaatcgacccgcgtctccatcgacttcgccttgacggcggccacgacggcgttgacggcccgcgtgttgcttgcggccgaactgtgggtcttgatttcgcagatcagtttcatcgaagcgtccttggcgccctgctccagataggcgtcaagcgtcggcagtttttcgccgttggccagcgtgaggtccctgatctgtgcataggcgctctcttcgatccgcaggtcgctgcctgccaccgtcgcgttgtggttgatcaccggcacgtcgtcgtcggtgatccagacgtcgaactcggcgccgtggatgcccagtttctgggcgttggtcagggcagcgatcgaattctcggtcgaattctccacgccgtcctgatgctggccgcggtgcgcgatgatccggggcatcgagacggagggattgtcgcagacggtgaattcgaccgtgccgatcgggtattggctgccgttgcggacgagcgtcatgaaataccggctcgttccggcgggaatccctgcggggagggtcactgccagcgactgaagggtattgtcgccggaggcttcggtgaatgcggcgtcggccgtgaacgctgcggtcacgttggccgccgaggtgaactttaccttgtcgccggctgcgaaaccgttgccgtagatcgtataggtgtagcctgcgccgatctcgcacctggtcaggtaggcgaggttcgagagtgcgaattctacgggcgtctggccggcgaacgccgcatcctggtagagcagggcgatctggtccccggtcagcgcgtcgtcgaagacgcgggccagaaccacttcgccgttccatgcgttgcccatcgaacctacggccgagtcgccgcccagcgcgaaccaccgtgcgccgtccttggcgtggatcagttcgcccggagcgtcggccgtgcccttgagttggccgtccacgtagatataggctttctcggcggttttgtcccagacgcccacgacgtggtagtaacggcccggttcgggcgtcacgtcgctctgcgcccagcgccacgtgcttttgcccgtggtgctcacattgggcaggaacgtgatgcaggccggatggcctccctggccctccttgcagatcaggaaacccgtgccgccggcttcatgcgccgagaagggcttgtactccttcgtgccgtcgttgcggttcgaacgcaggacgacctccagcgtgtggccgtcgtccagaccctgcttgaacgtctcgttcgtgtagtagtccacccggtaataggaatccttgcgggaaccctgccccggggtgtgcgtgtagttggtcacgatgcgcttgtagacgtcgtggtaatagcaggtcagcgccgtgccggggtaggagagcacctcgttcttgagcggcgatacgtcctcggccgtgccgtcggcgtggaagacaacgtcgagcaggtcggctttcggcgcttcgggcggcacgggtccgggttcctgcgtgatagtgaactcctcgaccagcgtggggtccgagaccgagatgaaccggactacgccggagcgctccctgctcacggtgttttccggaatcagaatcgccagcgtcatgccgtcgacggtggggtgggtgaaccagtcggtcttgctctggtctatcgcataggtccatttgccgtcggtcgttacggtgaacacgaccgtgctcccttcgtaggggatggtcccgttttcgggggcgaggttggacgctaccgagaacgcgacgtttttccattcggccgtctcgtcgtctttgcacgacgggcagagcgccagggcgaaagccgtgaacagaaaaaacgataaaaacccttttttcatattaggaaggttatgtggttaatttttcagttgattgatccggccgggtcattggtcgttttcaggcttctccgtcgtggggcggaccgggaagatcagcaccgtggcggccgccgcgttcacctccgtgtcgggactgccgaccgaaacgggcagcacgcagcgactgtccgccgtgatcgccgagacgtcgatccgaatgccgatcttcgcggtgtgggcgttgttgtcgagccgcacggcggcggtcgggaggttgtagcaggcttcgggcatcagcacgtaagccgtaccgttggccttgttgtaggcggccagcgcttcggcgtcgaccgagagtgcggccgtcgaaccgccttcgttgtagccgctccggtagatccacacctcgtagtcgaccgctgcggcatcggccgtcagggcgacctgttgcaggccgtttttcgggatcagcactttcgagccgatgtcgtatccgatctcttcgttgtcggagcacccggccaggcaggctgccgccgacagcgcgagcgctaaaaatagctttttcatggtcgtttcttttcgctaatggttaataacccggattctgaaccagctggccgttgatgttgagctgcgagttggggatcgccagccagtagtgtttcggcgtggtgaagatgcgcgtgtcgttctccttcatgtcgaccagcttgtagaacttctcgggcgtgtcgccctcgatgttccaggccttcgggatggggcgcaggcactcttcggcgatcttccagcggcggatgtcgtggaaacggcgtccctccatcaggaactcgatcgaacgctcgcggcggatgatgtcgcgcagcttctggcccgaggggatgccgccggccctgctccacgactcctggaacgtcggaaggccgcagcgcgagcggatcttgttcaggcactcgtagccgtagtcgctcaacgtgccgtcgtactcgaagtcggcttcggcgtagcttaagtatagctcggcgatgcgcatgtaggggaagacgtagctcatgtaggtgctgacggagtagtttccgcttgagttgagcgtcatcttcgactgttcgttgacccatttctggcagaaataaccgttgtaggactggtattcgttgtcgtagctgccggtgaagccctgcggctcgcccttgtgcgccttgatggtcattttgccgccgttgaagcggtacgtgccccggtcataacccaccgacgcatagaagcgcggctccttgtggaggtgcatctcgaccgtcccggccgccttgttgtaggccagcgggtcgatgtccttcgtctcggggtcgtcctcccacggaagtccgttccgggtgtaatacatctggacggcctcgaacgtcgggcacaaatagccgcggtaggcgcccgacaccttcgtgtagttgttggccaggtggcagccgaactgcttctgcgtgtaggtgatcgagcctgacttgttcaggctcatcaggtactcgttctggttcaagaactgtgtcgcgttgccgtcgccggtgaagatgtaggtgtagttggcgcgccccagttcgaacgggtcggtcgtgctggtgcttttcgacacggagaggcccagttggcggtcgtccatcgtgtaggctcccgtttccttcgaagcctccacgcagtcgatagcctccttggcggcgtccatcgcgcgtttccacttctcggcgtcgtaggtctggttgatcaggtgcgtgccgtccttgttgacgaaatcggcgtagaattccgaattgccgttcaccagcggcgatgcggcgtagagcagcaggcgggcgcggtaggccagcgccgtggccttgatggcgcggccgtacgcgatgggaccccagtagtcgggcagcatgtcggcggccttgcggaactcctcctcgatgaaattgacgcactcgtcgtaggtgctgcgcggcacgttcacgctgctggccggcgcattcaggtcgatctcctcccgggccagtacgatcggaccgtagtactccagcaggatctggtgcaggtgggcgatcaggaagtgcgcctcgcccgaccagtagcgcaggttggcctccgagatgtcgggaacagaacctatgttgttcaggaagttgtaggcataacggatgccttcgtagatgttgtacgagtagttgcccgtcggaagtcccgaggtcgttccccacatgttgaagtaggtgttcgtcgaggactcctgcgaggtggcgtatacgaggctcttccacgagaaataacgcaccgatccgtagtaactcgaaatcaggtcgtcgccgccgctcaggtcgggcatggcctgcgcatggaacaggtcggggcacttgccgtagaccatgaagagcatcttttcggcctgggcctgggtcttgtagatgtcgtcctgcgtgggactgccctcgggaacgacatccaggaaatcgcaggatgcggccgcgagaaggagggctaacgccattgctatttttttcataacggtatcttcttttggattagaattggtattgaacgccgattttcgccgtccgctgcaacgggtaggacaggccgtggccgccgcccttttcggggtcccagtagtcgaacggggagatgacgaagaggttgttgcccgacaggtagacgcggagtttcttgatggtgtagcccagctccacggttttcaggcgcaggtatttggcgtcgtggatgtagaaggtcgaactctgggtgttgttggagcttaactgcgaggtcaggcgcggataggccgcgtcggcgcggttgttgtcctccgaccagtggttgtcggcgatgtactgcgtgatgccgtagccgaagtgcgaggcgtcgcagaacgggtgcatgttgtacatccgcagcgatacgttggatgcgccctggaacatgaacgagaagtcgagcctgcgccacttcaccgtcgcgccgatgccgtactggatttcgggaacggtcgggctgccggccgtcgtcacgtcgttgccgtcgacgatgccgtcgccgttcaggtcgcggtacttgatgtcgccgaccgtgtagttgccgaaccgctgtttgggcgagttgtcgatctcctcctgcgaggtgaacagcccgtcggcgaccagcacgccggtgatggcgttgaccggatgtcccacgaccgacatgtagtcgtacatcaggtcgccttcatccttctcgaccacttcgttgcgcgagaaggtgaacgtgccgcgcaggctcagcgaccagtccttgttgaactgcttgttgtagacggccgaaaggtcgacgccgtgcgatttcacacgtccgatattgccgtagggcgtaacgcccagcaggcccgtcgacgaaggcagcgaggtgcgccgcatgaagatgcccgtacggtcttcggtgaagtaggcggcttcgatgttcagcgcgttgaacagtcccagttcgagaccgacgtcgagtttcttggcctcctcccacgtcgcgttggggttgccgtaggtggtgatcttcgggcctttgccctgggagttccagttgtagtagaatcccgattcttcgcccatggccacgatggagcggtaggggaagcgctcgcccaaggcgtcgttgcccgccagaccgtacgatacgcggatcttcaggttgctgaccgtcttgcggatgccgtcccagaacgactcgttggagatcacccagccggccgccgccgaggggaagaaaccccagcgtttgccgggagcgaagttctccgagccgttgtagccgaaactggcctcgaacaggtagcggttgtcgaatccgtaggtcacgcggcccgccatgccctgctcgcggtagggcagcaggttctcctcgctcgtgccggcgatgttgttcttcttctcgttcatgcggtagacgaacatggctcccacgtcgtgtttgccgaatttgcgggcgtagttcagcgaggcttgcagcgcgtagcggcggtggccgccgttgccgtcggtgctggtcaggtaggtcgtgcccgtgtcgccgatcgagttggtgatgagattggccgtgccgtcggggttgagcgaactgccgtcctcgaccttgaaataatagggggttgccgtgcggtaggtcgccgaataggtgtagttgtagaatgacgccgtgaggttggcgctcaagcccttggtgaagaaatccaggttctggtccagcgtgaaggccgtcgtcatgtaggagtagtagcgcttgccgtagccgcgggacagcttggccagcgggttgaggtcggtggcgccggtgtcccacgaggcgttgttgccgtagcgcacgaacgtgtcgccctcttcggccgggagcgtggccgggaaacgtaccggattggcgcgcatcgagtagtagaacaggttgccgatgtcctcgatcgggcgggtgttgtactccagctgggcgttgaccttgatgccgacgaccgtcgtcttggtgatgttggcgctgacgttgctctggaagatgtatttctggtggttcatcttcacgtcgtaggggttctgctcgatgtcggcgatgatgccgttttcgttcgaaaccgctgcgttgaggaagtagctgaccttacggccgccgccgcggatgttgaggttgaggttctggttgaccgagaaatccttgaacatcaggtcgtaccagtcgttgttcggatagaggtacttgttgagtcccgcctttgtgccgttgatcttgtcggccgagtagaacggctggtaggcgtggagcgttccggtctccttggcggtgttgaagacggcctcgttgtagagctgcatgtaggtcacgccgtcggccacctgctgtaccatcgtgggcatcgagaaggtgttttccagacggaccgagacgttcatcttctccgagttgcggccgtttttcgtgttgatgaggatgacgccgttggcgccgcgcgaaccgtagaccgaggtcgcctgggcgtccttgagcaccgagaacgactcgatcgactcgggaggcatgttgttgagcatgttgctcaacacctccacgccgtcgaggatgatcagcggcgagttgctcgacccgaaggtcgaaatgccgcggatgtagaacgaggcgctgtcgtagccgggttcgcccgaggtctggcgcgagatcatgccggcgatgttgccggcgaacgccgtggtcagcgaactggaggtgatattcaggtcggagggttttacggaggtgatcgaggcgaccatcgactcctttttctgcgtgccgtagccgatgaccacgacttcgtcgagcgcgttgctctgctcggcgagcgatacgagtttgaacagctcggtgtcctcgacgtggagtttcttcgtgtcgaaaccgacgtacgagaaggtcacatatttcgatttggcgggaatggtgaaggtgtacgagccgtcgccgttggtgatcgtgccggccgtcgttccttcgacgtagatcatcacgccggccagcggggagttgtcggtgccggagatcaccgtgccgctgaccgtttgggcgacgtcgcgcgaaccgctggcggcctggtagatgcggacctgcgtgccgccgaccgaatactgaaggccgacgtcgggcaggatctggtcgagaatccggtttgcgcttacgtttttctccctgaccgttacgaccttggtcaggatcggttttacttcatccgcatagatgaaccgcagatcgctctgcgcctcgatggattcgaggacctcccggatgcttgcatcggctgcatctatcgttacatagatgctccggatctgtgcgaggagatttccccccccccacgcgaggcatagggttccggacagcagcagcgcggcgacgaatcgcaggactgccggaaaatgcccgttcccgggtgctttttggcgagtttcttccataatggttttaattggttctggttagtaattggtgtggtttcgaaatacagagtgcatggtttggaccgttttttgggccggatgtgtgtgttttgtaggagcaaattgaatttaagggttttgtggactattccatttgcaaatatagaaattatgcaataaaatgcaagcatttctttgattttgattttttctttttggaagaaggagtgttttgaatcgaaattgatgcgcctgcgtcgcttccgggtggagtttgccgggcgcggggtgcgttcttcggaaaaaatggttacttttgccgaaaacaatccggcatggaacagcacgaaaccgacgaaaaattcatgcgcctggcactaaacgaggcgcaaaaggcgttaaaacaacaggaggtgcccatcggtgcggtcgtcgtggccggcggtgcggtgatcgggcgggggcacaacctcgtcgaaaccctggccgaccccacggcccacgccgagatgcaggccctcacggccgctgccgcgacgctcgggggcaagtatttgcaggagtgcacgctctacgtcacggtcgagccgtgcatcatgtgcgccggggcgatcggatgggcgcaggtgagccgcgtggtgtggggcgccgacgatcccaagaagggcttccggcgttactctgaggcggtgttccaccccaggacgaccgtggcgcggggggtgctccgggaggagtgcgaggagttgatgaacggttttttcgcgggtttgcgcggatagatttggtaaaaaaggaattttttttatacttttgcatccaacgcgtttcggacaggggcgcatgaactgaaaaacttataaaatcgaatagaaaagcaatgaaaaagttatttgtatcggttgtcgcgctgttggcggcggtgtcgctctcggcgcaggatgttactgcaatctacaacgaagccgcagcagctttcggcgccaaggatttcgcaggcgcggccgcgaagttcgaacaggtgatcgagcaggggctggacagcgaggaggccgcgtcgctggtggccacggccaagacgacgcttcccaaatgctactttatgatgggcggcggagcgatccggaccaagaactacgacgaggcgctgaagaatttcaccaaatcggcggagctggccgaactctacggcgacatgagccagatggccaaggccaacggctgggtggccaagatctatcagattcagggcggcgacgctttcaacaacaaggactatgcgaccgccgcaggcgtgttcgagaagggctacaaggccgacccggacaataccgcgatggcgctgaacctcgccatgagctactgcgagatgggcgagtacgagaagggtatggacatctacgaggcggtggccgccaagacgcaccccaagtatgccgatgacgccgccaaggccaaggagatgatcgccctctacaccaataacaaggtggccacgcttcaggctgccaacgatttcgacggtatcatcgcgatggccgacgcgctgctggcgaagaacgccgaaaacgctctggcgcagaaggtccgcttgcaggcttatgccagcaagaaggattacaacaaggtgatcgagctgggcgaggctgccgccaaggtgcagaccgatcccgaggatgtgagcctgatgtacctgacgctgggcgccgcctacaacgccaaggagatgaagccgcaggccatcgaggccttccggaaggtgacggcgggaccggctgtcgagagtgcgaaagccgcgttggccgaactaaccaaatagcctgcgggccgcaggaggaagagggcggcctgccgggttttccgaagggccgcagacagtgagcctccggccccatgaaataaaccgcagagcgggttccggatttccggaacccgctttttcgtgccggagcggggggctggttcagcgttccgacggctcttcgggtgcggcgtttcgaagggcgttttctcggatgcgggtcagtccgctgcgtgtcagcggcgtgcggccgcagagggcttcgaacgccgcttcatccatgccgagccacgtcgcggcgtccatcgccagcgggtcgaacacggcatcgaacgccgcgttgcggtgctgcggggcgcggcggttccaggggcagaggctctggcacgcgtcgcagccgaagatccagccgtgaaggtccgtttgaccgggctgttcccgctcgatggtgcggcacgagatgcagcggcccgtgtcgatggtcctgtccggggcgacggctcccgtggggcagttgtcgatgcagctgcggcaggttccgcagcgcgacccttcgaacggcgcgtcgtagcggtcggtctcttcggtgagaatcagctcgcccagcacgacgtagctcccgtattgcggcgtgacgagcagcgactgccggccgatccaccccagcccggcctctacggccagctgcttttcggccagcggcgcggtgtcgacgaaggcgcggcctcccagaccggggtgcgccgcgcgcagggcgtcgagcatcccgccgagcatcgtccggagggtggcgtggtaatccgccgcgcaggcgtaggaggccaccttcgtccggtgcccgggcggatagccctcgccgacgcggtttttgtacgacacggcgcagaccacggccgtgcgtgcgccttcgaccagccggcgcgcgtcgaagcgtttgtcgacgttgcgttccagatagcccagcgacgattggcggccgcgggccagccatgcgcggaacagcgcctcgttttcggccagatggcggcacggggcgatgccgcagaggtcgaaccctgcgccggcggcgagccgtttgatgtacagatggtcgatcatcgtgataattaatgtcaaaaatagtgttttttagccggaaattagtaatttcgccccaaacttttgcgttatccgaacgtagctaaaaaagaacacatgatgactatcaatacactgtacgaactggtccgcaacagcgtggagaagttcgcgtcgaaggtcgctttctcgatgtacgagggcgatgacgtgacttatgccgaggtggaccgtcgtatcgccagggtgcaggaaatcctcaccggagcggggcttcgcgccggggacaaggtggctctcctgagcagcaacatgcccaactggggcatcagctatttcgccgtcacgtcggcgggcatggtggccgtgccgatcctgcccgacttctcgggcgaggagctggacatgatcatcgagcattcggaggccaaggccctgctcgtgtcggacaaacttttcaccaagctctcgaagcagaccatcgagcggctcaacgtggcggtccgcaccaagaacctcggcgtcatctcgcagcgcgtccgcggggaaggctcgacgggcgttccccggcccgacgacctggccgtgatcatctacacgtcgggaaccacttcgaagcccaagggcgtgatgctgacccatgcggcgctctgcgcgcaggtcgacatctccgcctcgatcttcccggtcgacggcggcgacacgttcctttcggtgctgcccctctcgcacacctacgagtgctccatcggcatgatctatcccttctcgatgggcgcgcgggtggtctacctcgaccgtccgcccacggcctcggtgctgatgcccgccctgcgtgcgatccgcccgacagtcatgctgatcgtgccgctgatcatcgagaaaatctaccgccaccaggtgctcgccaagttcaattccaactccttctggcgcacgctctaccgcatcggcttcatgcgccgctacctccaccgcgtcgcgggcgggaaactgatgaaactcttcggcggccgtctgcgcttcctgggaatcgggggtgcgaaactcgacggcggggccgagaaattcctgctcgaagcccgcgtcccctatgccatcggctacgggctgaccgagaccgcaccgctgctggccggcgcggccccttcgatggtgcggctgggatcgaccggtccccaggccccgggcgtcgaactgcggctggagaacgtcaaccccgagacccgtcagggcgagatcgtggcccgcacgccgagtgcgatggtgggctatttcaagaatcccgaggctacgaaggaggctttcacggccgacggatggttccgcacgggcgacctcggggagctggacaaggacggctggctctacatcaagggccgtctgaagaacatgatcgtgggtcccggcggcgagaacatctatcccgaggacatcgagacggtgctcaactcgcacgtctgcatcgccgattcgatcgtcacggagcaggagggccgcctgatcgccctggtgcacttcaaccgcgaggagatcgagtcgatgatcgacgactggcgcgaggagtgggagagcaagaaggaggcctgggaggccaagaccgaacagctgaagaaggagatcatggatttcgtcaacgccaaggtcaaccgtttttcgcggatctcggaggtcgttgaggagaaggaggatttcatcaagacccccacgcataagatcaagcgtttcctttacaacaagaacaagaacggccagactccggaccagcctgccgccggaaaataagcaaagcccccgctccgagagcgggggctttttcttaatccggagcagccggagcgtttccgcggggcggtcggctttcggcgagggaccggggcgctttcgaggagccgcctcacttgaggtggatgccgtgggcggcgcactcggcgatcatccgctcgggccagatgctgacctggacttcgccgatatgggcgcagcgcaggtagaacatgcagaggcgcgactggccgatgccgccgccgatcgagagcggcagccgtccttcgagcagcaggcggtggaactccatttcgcgccgctcgggacatccgcagatcgcaagctggcgttcgagggcctcggcgtcgacgcggatgcccatgctcgaaagttcgaaggcgctctccagcaccgggttccacacgatgatgtcgccgttgagccctttgtaaccgccttcggtcggggtgctccagtcgtcgtagtccggggcgcgtccgtcgtgccgctgcccgtcggaaagttcgccgccgatgccgatgaggaacagcgcgccgtatttgcgggccgccgcctgctcgcgctccttgggcgtcagcgcggggaactcctgcaacaactcctcggcctgcaggaacgtgattcgctcgggcagtatgggcgtgatgtgcggatagagttcgtaaacctcctcctcgacggctttcatcgcctcgtagatcgtttcgacggtcgctttcaggaagttcaggttgcgctcttcggggcgcatcgtgcgttcccagtcccactggtcgacgtagagcgagtggatgttgtccagctcctcgtcggcgcggatggcgttcatgtcggtgtacagcccgtatcccggggcgatcttgtaggtccccagtttcatgcgtttccatttggccagcgagtgcaccacctcggcccggcggtcgcccagatcgcggatcgggaacgacacggcgcgctccacgccgttcaggtcgtcgttgatgcccgtgcccgaaaggacgaacaacggcgccgtgacgcggcgtaggcgcaggcggcgggccagcatgtcgggaaaaatctccttgagataggtgatggcctgctccatcgtttcgggagcgagcttggccgtatagtcttccggaatgaaaagcggcataagttcagggtttggattcgtgaaaaacggtttattttgcaaatatagtgaaaggtgagggcaattgggagtgttcaggctcaaaaaatgtcggttttaaccgcggaaccggattttggcctgcccgaaatccgttccgggtgggcggccgcataaaaataacgcacgtaacagaagcgttacgtgcgttatttcatttccggttccggttatttcgcggcgggcagcagcgccgagtcgggctgctggcgtttgtcgcccacgtcgatcaggttctcctcggagacccccagcgaacggtagtagtcgttcagttcggccaccacctccttgcggtcggcgtagctggccaggtagtagatgtcgcccagctggtcgagcttctcgtcgataaggcccgagaccatgtcgccctgcgccccttcgaaacggaggtagtgctcgatgtattcgatcagcgtctgggcatactccctcaagagggcgtcgcccttcgcggcggcttccttgtcgcccatggccgaagcggcgtaataggcctccaggaaggggtaggtgttggtgtcggtgaagcgcacctgcgaggtcggcatccgctccagccccaggtcgagcagctcgacggcctctgcgacgcggttctgccgcagcagctccttggccacgcgggcgaaggcgtcgcgggcgtgcgaggccgaaaggttgtactggatgaagtagtcggcgtagacccgcgggtctttgaggttgccgtagcggaacgtgtcgcgcagcagcggcgcggcgtagtcggcgtcgatgcgtccgatctcgtaggggttctgcgtcggggtgaggatcggcaccaggcggtaggcgtagccgtcgaactggaggtagtccatcagcccaaagtcctggagaatgtagacctgcgtcatgtagatcgggcgtttccagtcgaagttggccagcatgtcgaggatcatcagctggttcttgtccagcgaattcttcttgatgttgatgaacaccgtgtcgaccatcttgtcgcggtccttttcggccacgatgcccgacgccagggcgttctccttgttcaccggcagggcgatgcgcttggcggggatgtagtcggccagcgtgccgtcggcgagtttgaccttgctgcgggggtcgtcgctgcgcacgaagtcgatcacctccttgatctccaccgggcggtcgatgctgttggtgacgtagatcatgtcgttgttgaaggtgtacttgtgcttgggcagcgagaaggggacgccgggggcgtcgttggccttggtcttcatctcgtcgatgtaccactcgccgccgaggtaggaggtgttcataatccgcacgtcggggcgcacgccgtagacctcctgattgttccacagcgggaaggtgtcgttgtcgccgtagttgaggatgatcgagttggggagcgtcgactggaggtagttccagccgatgtcgcgggccatcgtgcggtgcgaacggtcgtggtcgtcccagttctgggccgcgaggatggccgggacgctcattgcgacgaccgttgccgcggctgccgtcgccacgttgtcgcgcttcgagagccgggcgatcaggtcgcgcagggccagcacgccgaatccgatccagatcgagaaggcgtagaacgatcccgcatagacgtagtcgcgttcgcgcggctcgccgggcgaggtgttgaagtagaagaccagcgcgatgcccatcatcacgaacagccacagcacgatcgagaagttgcgctggtcgcggttcaactggtagacgagtccgatgagtcccagcaggaaggggaggaaataataggtgttccggcccttgttttcggcgatttcgcgcggcaggttgtcctgcgggccgacgtatttctcgtcgatccagcggatacccgagagccagttgccgtcggtgatcgtcgtgcgcgaaggctgtatgtcgctctggcgtcccacgaagttccacatgaaatagcgccagtacatgtacgaaagctggtagttgaagaagaaatggacgttttcccagaacgtcggttcggtgaccgtgcgggtttcgccgtaggagtcggtgtaggcccgtttgcgtccgaagtcgagcgtctcgccgcgcatgggacgcccctgtgcgtcgcgcaggacctcgcccttgtcgtcgcgcagcgtctcggtcttggtgcggtaggcggcccactccttgtaggccttttcgcccttcgagtagttccacatgcgggggaagagctgcatgaactccggagcgtgggtgtagcccgtgagcaccgtggcggtcttgtacttgccgtcctcgtccagataccacaccttcttctccttcacgccctcggggggagccgaatactgcgcgccgtacagcagcgggcggtcgccgtactggtcgcggttcaggagcgacagcagggcgtgggggttgttggggttgttggagttcatcggcgggttcgccgcggcgcggatggtcaccgaggcgtaggaagagtagccgacgagaatcatggtcgtcgagagcaggatgatgttgagcagcacgcggccccgtctgtgggcggcccatgcggcccatcccaggccgatgatcagcgccagcgcgaagagcgtgatgcccgagttgaccggcaggccgaacgtgttgacgaacagcgtgtcgatctgcgccccgatccagacggtgtaggggatgatgatgttgttgacgaagacgatcatcgccccggacacgagcgtcgagagggcgatgcctcgccaggtcaccgtggcggtcttgcggaagtagtagatgaagaccagcgcggggatgcagagcaggttgaggatgtgcacgccgatcgagagtcccatcaggtaggcgatcagcacgatccagcgcgaggagtggggttcgtcggcctgctcctcccatttgagcatcagccacacgaccagcgccgtgaacatcgacgagagcgcgtagacctcgccctcgacggccgagaaccagaacgtgtcggtgaaggtgtaggccagggccccgacggctccggcgcccaggacggcccatgtgttggcggcggtgagctgcgcgccgtcgcgcgtcaccagacgccgtgccaggtgggtgatggtccagaacaggaacaggatgcagaaggcgctggccagcgagttcatggcgttgacggcgatgcccacgtagtcggggtttccgaaggcgaagagcgtggccaggcgcgccagcatcatgaacagcggggctccgggcgggtgtcccacttcgagtttgtaggatgtcgcgatgaactccgagcagtcccagaggcttgagacgggttccatcgtcatcagatagaccatcgccgcgacggcgaatacggcccagcccgtgatgttgttccagcgtttgtaaaagtgcatatccgagaaaacttttttcgtaactacttatcgtgcaaaagtaatgatttaacgcgttttttccaaccttattacgcgaaatgcgtttacagccaccttttccaccattttttctgcggggcctcggccgttgccgccggtgcggcgatggcggtagccgcggacccggcggcgttccccgaccctctgcgtttgcggcggcgggacggctttgccgaaggggccggagccgggttgggggcgtttttcggcgctgcggtggcggcggatttgttcccggcggctttcgcggcattgcgggcggccttctgctccgtgttgcgggccggccgctgcgcaggctgctgtccggcgtccgcatcccgggcgggacgctgtgcggatttggctccggcgttccgggccggtttcggctcctgggtgcgggcgggacgctgtgcggccttctgcgcgggtttccgcgccggggcggccttgcgcagggcatattccggaaccggtccctcggtggggatcgtaagtccggtgagtttctggatgtcgcagagatactcgaactcgtcctccgagcagaacgaccacgccgcgccctcgtgtcccgcgcggcccgtgcggccgatgcggtggacgtaggtttcggccacctccggcagttcgtagttgatcaccagcggcagctggtcgatgtcgatgccgcgggcggcgatgtcggtggcgatcatcacccggcactcgcccgacttgaaatcgttcatggccttcacgcgggcgttctgcgacttgttgccgtggatggcgcacgaccggatgccggcccggttcaggattttggccagcttgtcggcgccgtgcttcgtgcgcgagaatacgagcacctgctgggcgtcggatgccgagagcaggtcgatcagcagctggcttttttcggctttttcggcgaaatggaccgtctgcgcgatggtctcgaccaccgacgccgggggcgtgacggtgaccagcaccgggttgcggaggattttcgcggccagcgcggcgatcgactcgggcatcgtggccgagaagaagagcgtctgacgccgttcgggaagcagcggcaggatgcggcggatgtcgtggatgaagcccatgtccaacatgcggtcggcctcgtcgagcacgaagaaacggatcgtgtcgagcgtcacgtaaccctgcccgatcaggtcgagcaggcggcccggggtggccaccagcaggtccacgcccttctggagcgcgtcgacctgcggacgctggttgacgccgccgaagatcacgcagtggcggatgggggtgtagcgggcgtagtcgcggcagcactcgtcgatctggatggccagttcgcgcgtcggggtgagcaccagggcgcggatcgggcggcgtcccttgggggccggttcggcggctaaaagttggagcatcggcagcgtgaaagctgcggttttgcccgttccggtctgggcgcagccctggaggtcgcggccttcgagtacgggaggaatggcttgttgctgaatgggggtgggatctgtgtaccccttttctccgatggcgcgcaacagcggctcggagagtcgtaagtcttgaaatttcataataatcggcgtaaaggtacgatttatttttcggtttccgtgtaaaaattcgtacctttacccgttcaaaacgttaatttgcgattatggattccaaactcgtactttacaatacgctcacccgccgcaaggaggtcttcgagccgctcgttccgggccgcgtgggcatgtatgtctgcggtcccacggtctacggcgatccgcatctgggccacgcccggcccgccgtgacgttcgacctgctgttccgttacctcaaggcttcgggctacaaggtgcgctacgtgcgcaacatcaccgacgtgggccatctggagcacgacgccgacgagggcgaggacaagatcgccaagaaggcccggctcgaacagctggagccgatggaggtggcgcactactacacggagcgttaccaccgggcgatggacgcgctcaacgtcgagaccccctcgatcgaaccctatgcctcgggacacatcatcgagcagatcgagttcgtgaagaggattctggccgacggctatgcctacgaggcgaacggttcggtctacttcgacgtagagaagtacaacgccaaatacaactacggcaggctgtcggggcgcaacctcgacgacatcgtcgccaacacgcgcgagctggacgggcagtcggacaaacgccactcctacgacttcgcgctgtggaagaaggcgtcgcccgagcatatcatgcggtggccgtcgccctggggcgagggtttcccgggctggcacatggagtgctcggcgatgtccacgcgctacctcggggagcgtttcgacatccacggcggcggcatggacctgatgttcccgcaccacgagtgcgagatcgcgcagtcgaccgccgcgctgggccacgattcggcccgctactggctgcacaacaacatgatgacggtcaacgggcagaagatgggcaagtcgctgggcaacttcatcacgctggaggagttcttcaccgggtcgcacccgaagctttcgcaggcctattcgcctatgacgatccgtttcttcgtgctccaggcccactaccgctcgacgctcgatttctcgaacgaggccctgcaagccgccgagaaggggctggaccgcctgatgaagggcatcgagacgctcgggaagatcaaacccgcggaggtctcgacggtcgatcccgccgagctggagacgcgctgcgccgaggcgatggacgacgacctgaactcgccgatggtcatttcggcgctgttcgactgggtgcgcacgatcaaccagctggccgacggctcgcagacgatcacggccgccgacctcgcggcgctgacggccaccgtgcgccgctacgctttcgacatcctgggcctgcgcgacgagaaggccgccgggacggcttcggggcgcgactacgtgacgccgctggtcgagatgcttctggacgaacgcctgaaagcccgtgcggcgaaggactgggccgcctcggaccgcatccgcgacggactcacggccgccggcatccgcgtcaaggaccgcaaggacggcacggactgggaactggaataaaacgcctgctggtatggggaatccggacaagatcgtagccgtcggactgggcgaggtgctttacgaccacgatgtcgtgacggacgaatataccttcggcggcgcgccggccaatttcgccgatcatttcctcaagtgctcccggctgatttccggtccggatgcggcggaggtgcatgtggtcagcgcggtcggggacgatgagcgcggccgcgcggtgtcggccgaactggaggcccgcgggctttgcgacgggctttgccgcgtcggggagctgcctaccggcgtcgtcgacaaacgccgggatgccgccggggtcaacgcctacgagattctgcccggcgcatgggatgcaatgacgtggtcggatgcgctggcccggctggccgcccggaccgatgtggtctgcttcggttcgctggcgcagcgcagcgcggcgtcgcacgctaccgtcgtccggtttctcgacggggtgattcgccgggagcggccgacgctgcgcgtgttcgacgtcaacctgcggcaggatttcttctcgcgggaggtgctggaggagtcgatggctcgctgcaatattttgaagatcagcgacgaggaggctccgcgcgtggccggatgcctgaccggatgtcccgccgccgatccgggcgggctgtgccgggagttgctcgaccgccgggagaacctcgaaatggtcatcctcaccgagggcgccgagggcagccgcgtgttcacccggaaccggatttcggcctatgtgattccccgcggggagcgtgtccgccctgtcgacacggtcggtgcgggcgattcgttcacggcggcgttttgcgcgatgctggccgccgggtacgacatctggccggcccaggcgttcgcgtcgaaggtcgcggctttcgtctgttcgtgcgcgggcgccacgccggagtacccggccgcggcgaaaacggaattttcagggaatttgtaacgttttatctgataaggacagagacatggagacataccggtacaataccttgcggtttttcagggtgcagttcggcctgcccgcccggatgcctttggagtggtgcgtcgtacgggagacctcgcgtgcgggcagcgaattgcggctcggcgtcgcgctgaaaggaacggggctgtacatcgacgtggcgatgcggcggttcttctcgcagatcgacattccgctcatcgagcgccgctgctacccggccgagcggatcagccggggggatgactacgaataccggagcgccgaagggtggagcttcacttgccccaagcattacatttgcgatatttattaccccgcgcgattcagccgcgaactgctggcgcatagcgtgctgtgaggcagccccgggcgtgcgtgccgtacgtgcgggccggtaatggaatttttaagggaatataacttatgacggagataaaatcggcggctttggagctcggaaccgagcgaatccggaagctgctcgtgcaatatgccgtgccggcgatcatcgccatgacggcctcgtcgctctacaacatggtcgacagcatcttcatcggccacggggtcgggccgctggccatctcgggccttgcgctgaccttcccgctgatgaacctcgccgcggcgttcggttcgctggtgggcgtgggcgccgcgacgctgatttcgatgcgcctgggccagcgcgactacgaaacggcccagcgggtgttgggcaacgtactggtgctcaatctgatcatcggcatagcgttcggcctcgtggcgcttctgttcctcgattcgatcctctatttcttcggggccagcgaggccacgatcggctatgcccgcgaatacatgaccgtcattctgctgggcaacgtggtcacgcacatgtatctgggtctgaactccgtgctgcgcgcctcggggcatccccgcaagtcgatgtacgccacgatcaacaccgtggtcatcaatacgatcctcgacccgctgttcattttcggtttcggctggggcatccgcggagcggctatcgccacggtgctggcgcaggtcatctcgctcgtgtggcagctgcgcatcctttcgaacaaacaggagcttctccacttccgccgcggcatctaccgcctgcggaagaagatcgtgcgcgacatgctggccatcggcatgtcgcccttcctgatgaacctcgcggcgtgcttcatcgtcatcctcatcaacaaggggctgaaggagtacggcggcgacctgatgatcggcgcctacggcatcgtcaaccgcctggcgttcttcttcgtgatgatcgtgctgggcgtcaaccagggcatgcagcccattgcgggttacaacttcggcgcgaagcagtacgaccgcgtgatgcgcgtgctgaagctgacgatgatcggcgcgacgtgcgtcaccaccgcgggattcctcctcggcgagttcatgccgcgcctggccgtgggaatgtttacctccgacgaggagctgatccgcctggcggtcgaaggcatgcgcatcgtcttcttctgcttcccgatcatcggtttccagatggtggccaccaacttctttatgagcatcggcatggccggcaaggcgatcttcctgtcgctgtcgcgccagctgctgtttctgatgcccggactgatcttcctgccgcacattttcgacgtctgcaccgagtggaacggcagctggggcgtgtggtgctcgatgccgctgtcggacttcctggcttcgctggtggctttcttcatgctgacttaccaactgcggaaattccgggccatcggtgcggaaaacgccgccaaagagggataggactatggaacaattcgtcatcaacatcggccgccagctgggcagcggcggcaggaccgtcggggagatcatcgcccgcaggttgggcgtgaagctctacgacaaggagctgatcaacctggcggcgcgcgagagcggcatctgctccgagtttttcgagaaggccgacgagaaggagtcgcgcggcgtgatttcgaccgtggtcggctacctgcgggcgccgttcgtgggcgacgacgggggcgtgacgaacgtgctgtcgaacgacgcgctgttcaagattcagagcgacgtgatccgcgccgtcgcggcgcgtgaatcggcggtttttgtgggccgctgtgccgattacatcctgcgcgagaatccgcgctgcgtcaatgtcttcctcacggccgacgatgccgaccgcatcggccgcatccgccgccggcagggatgcaccgcggaggaggcccgcgcgatgatggagcgcgtcgacgcccggcgcgcctcgtattacaactattacagctcgcggacgtggggcgaggcggcgacctaccacctctgcgtcagcacctcgccgctgggcgacgagggcacggcggatttcatcctggagttcgccgcacggaaactgaacatgaaattttgagcatattatggtacttgcggaacagatcaaggagatcgaacagcgccgggaagcgctggaacgctgtttggacatcgaccagaagcgcatcgacctgcgcaacgaagaggagaaaacccaggagccgaacttctgggacaaccccgacaaggcgcgcgagcagctgcgcaaggtggcggggatcaaggcatgggtcgaggattacgacgccattcgcaaggatgccgaggaccttcagctgatgcccgacttcgtgaaggagggcgtggtcagcgaggaggagatggacgcccactacgccgcgacgctcgaaaagatcgaaaaactcgaaatgcgcaacatgctgcgccgcgacgaggacaaactcggggccattctcgacatcaacgccggggcgggcggcacggaggcgctcgactgggcgtcgatgctcatgcgcatgtacacccgctggggcgaggcccacggctataaggtcaaggtgctggacttccaggccggcgacgaagtcggggtgaaatcctgcacgctggagttcgagggggaatacgcctacggctacctcaagagcgagaacggcgtgcaccgcatggtgcgcctgtcgccgttcaacgccaacaacaagcgtcagaccacgtttgcgtcggtgttcgtatcgccggccgtcgacgacacgatcgagatcacggtcaatgccgccgacatcgagtgggacacgttccgttcgtcgggcgccggagggcagaacgtcaacaaggtggagacggccgtgcgcctgcgctaccacgcgaaagaccccgacacgggcgaggcgatcgagtacctgatcgagaacatggagacgcgctcgcagctgatgaaccgcgagaacgccatgcgcatcctccgctcgaaactctaccagcgcgagctggacaagcgtatggcgacgcagcaggcgctggaggcttcgaagaagaagatcgagtggggttcgcagatccgctcgtacgtcttcgacgaccgccgcgtgaaggatcaccgcacgggcgtgcagacttcggccgtggagtcggtgatggacggcgacctggacgccttcatcaaggcctatctgatggaatacggcgcgcaggcgtagggattattcctcccaatgataaagtccgcccacttctttccagcccgaatgcgtcttatgtagaaggacgccgctgccgttgtactcttccactacctcggcaacggccttgtcgagtgatttgttcaggacgatgtatccgattgcggggattccgagatgccatccttcccaatgcccgttgatgacgtaccagtagttttgcaggaaacgcatccgcttccggcccgattctgcggatgtccgctcttcgtcgggccagtatccgtttttctccagaaacagttcgagagcatccttgtattcatcggtgagatagagctgttttaaccccgcttgccggatttgcggtcggaaatcgtccaaaaccctgtaataggctcccgctttgcggagaaggtaaaatccgtcggtcggaaatgtgggaggaggggagctttcgtaataataatcgaacatgccgtcctctgcgacacagaacgtcaattgcgattggataacgacgtagcggtaggccgaatcgctccggaaacccctcggacgaagcgtcgggtcgggattgaagagggtggtaaagagattgtaaacgttacgcagcgtgtcgttctggttgtccggagccgatgcgttggacgtatatttccgatgccatgtctccggaaactcctccatccccggtcccgatttgcaggaatagattgagtcgagttcctgggctaactcttttgctcgggatggagcgtagcgaaaatccgtattgtccgcctccgagggcagcgcatctttcgttgcccaaaggaaatagcctccgatgaaacagacaaccagaaaagacagggccgggaaaaggttcagctcggagcgatccgttttacgaaggttcatggcagaggcgcttttccgcaaagatagcatttttcggtgcaaaatattatctttgctctatgaagcgatctgtttttatccttgtattcaccatttttgcagccttcgccgctccggcgcaggtgaacgtcggcatgaccgacacggcgtcctattacccgctgctgcggggacggcgcgtggccgtgctggccaaccagacctccgtggcggagctgcccggcgcgccgggagccgatgcctccgggcgggtgcatctggtcgacctgctccacggtgaagggtttgccgtcgcggcgatcttctcgcccgagcacggattccgcggcacggccgatgccggggagcgggtcgcaagttcggtcgacgcccggacgggcattcccatccgctcgctctacgacggcaacgcgaaacggccttcggacgaggcgatgcgctcgttcgacgtgctggtcgtcgacatgcaggacgtgggtctgcgcttctatacctattatatctcgatgctgcggatgatggacgcctgcgccgatttcggccgcctggtcgtggtgctcgaccgccccaatcccaacgggcatcttgtcgacggacccgttctcgacatgaagtacaaatcgggcgtcggggcgattccggtccccgtgctccacggactgacgatgggcgaaatcgcccgcatggccgttggcgaagggtgggcgaagccgtgcgacctgacggtcgtgaagtgccgcaactacacccatgccaccgaatacctcttgcccgtcgctccgtcgcccaaccttccgactgcgcgcgccgtctatctctatgccgcgctgtgccccttcgagggcacggtcgtgagcctcggacgcggaacggactgcccgttcgaaatctacggacatcccgatatgaccggacgcgccttttcctttacgccgcgccccacggccggggccaaacatccgccgctcgaaggccggctgtgccacggcgtcgacctgcgcggcatgccgctctccgaggcccgcgaagtgggattctcgctgcgctacatgatcgacgcctaccgcgatctggggctgggggacaggttcttcaccccgatgttcgaaaagctggtcggtgcgggatgggtgcgcgggatgatcgtggccggggcttcggaggaggcgatccgcgcccgctgggttcccgatgtggaacgctaccgcgaaaagcgggtgcagtacttgctttacgaatagaatgatggggttttacgtcattgcgaggagctgcaggcgacgtggcaatccgaaaaaaacgcagagtcggccatggagagcagctatgtatatatattgaccaataaactgcatacggtgctgtatgtcggcgttacgacctcgttatcccggcgtatgaaagaacatgccgccggtcagtctgcatttacgcgccgctataacgtccataagttgatttacgccgaggagtatcgggacgttcgggatgcaatcgcccgggagaaacaaatcaagagttggagccggaaacggaaaatcgggttaatagactctcaaaattcattgtggaaggacttatcggacgggttcgtctgattcttgatctgggccgtaatgccacagcgcagcaatcggattgccgcgtcgctgcgctcctcgcaatgacgtaaaagcgccccggatcggagcgctttttctttttcatacgggcgttacccgatccgcctcggtgatctcccgcaggacgcggcagggcgagccgacggccacgactcccgccgggatgtcgtgcgtgacgacgctcccggccccgatcaccgtgttgtcgccgatcgtcacgccctgcatcacgaccgtgtggcctccgatccagacgttgttgccgatggcaatgggcagcgaacgcatgatgcccgcgttgcgctggtcgggcagcagggcgtggttgacggtgtagatgccgacgttcggcccgatgaagacgtggtcgccgatggtgacgggcgcttcgtcgaggatcgtcaggttgaaattgccgacgaaatggtcgccgaccgaaatctgcgctccgaaatcgcagtggaacgggctgtggatgcagaccgacttgccgacgtgtccgaacagctgccggatgatcgcctcccgctcctcccggcggctcgggggcagctggttgagccggaacaccagctcctcggtccgcagcagcgcgccgccgatttcaggacagatggcgtggagccaaagcccggctttcattttttcgagatcgcccatgattcgttggttgttgggtgggggaagcggcttttcaaaccgcaaaaagcacaccccgttgccgaggtgtgcttctctttcggatattccgtgttactccgaaacgatcgcctcgctcgggcatacgcctgcgcaggtgccgcagtcgatacatttgtcggcgtcgatcacatagatgtcgccggccgaaatagcctctacggggcactcgccgatgcagctgccgcatgcaacgcacgagtcggtaattttgtaagccattgtgttgagtgtttattgttaaatgtgtgtgtgcaaatataaaaacttatttgataatatcaaaacccgtgtagggaatcagcgcctcggggatgcggatgccttcgggggtctgatagttctccagcagcgcggccacgatgcgcggcagggccagcgacgagccgttgagggtgtgcgccagctggattttcttctcctcgtcgcggtagcggagtttgaggcggttggcctggaacgactcgaaattcgataccgacgacacttcgagccagcgtttctgggcctcggagtagacttcgaaatcgtaggtcagcgccgaggtgaacgacatgtcgccgccgcacaggcgcaggatgcggtagggcaggcccagggccttgacgatgctctccacgtgggccaccatgccgtccaatgcttcgtagctcttttcgggcagcgagagctgcacgatctccaccttgtcgaactggtgcaggcggttgagtccgcgcacgtccttgccgtacgacccggcctcgcggcggaagcacggggtgtaggcggtcatcttcaccgggaaatcctccttttcgaggatcacgtcgcggtagatgttcgtcacgggaacctcggccgtgggaacgaggtagaagttgtctaccgtggcgtggtacatctgcccctccttgtcggggagctgtcccgtgccgaagcccgaagcctcgttgaccatcacgggcggctccacttcgaggtagccggccaccgtgttgcagtcgaggaaatagttgatcagcgcgcgctgcaaccgtgcgcccttgcccttgtagacggggaatcccgcgccggtgagcttcacgcccaggtcgaagtcgatgatgtcgtacttgcgggccagctcccagtggggcagcgggttttccggaagcgcggtgtagctttccacgagcttgacgacgaggttgtcctcggccgtcttgccttcggggacgatctcggcggggaagttcggcagcgagacgatggccgactgcaactcctgccgggcgtcggtcagctcggcttcgaggcgcgaggacttctccttgaggtccgccacgaagcgtttgcgctcctcggcctcctcgcggcggccctggcccatcagtgcgccgatctccttggcggccttgttctgggcggccagcgtgttgtcgagttccagctggagggctttgcgccggtcgtcgaagctgatgatcttttcgatgacaggcgcggcgtccacgcccttcttggccagcttgcgtgcggcggcctctttgtcatcgcggatttgctttatcgtaagcataatatcgtgagtttttttgtgttttcgccttacaacctgcaaaattagtaaattcgcgtcaaactgtcacgccgagacgccgttttttgcgattttatgaaaaaaccggacttccgcccaaagcggaaatccggttttcggttgtgcgggctgcggatcagcgggtgtggagcacgaggtccgtgcgcagacgcttgccttcggccgggactttcgctgccgtgtttccggaggctttcgccggaacggcgacgcgttcgcccgtcaggtaggtcgtgaagcgctgtccgccggtctcgatgcttccggtccgcgattccgcggcgcgggccgcggtctgtgcggacgcctgctggaggggcttcatcttgagggacgagtaggttttcgaaccggcgtactggcgcaggtagctcgaactcgacgcctgcggcgtgctgaagagcaggaacatgtagctgttgacctcttcgggtgagtaggggcttgaagcccagtagagcgtgtcgccgatgtagccgacggccattccggcgtcgccccagaagatcgacagtccgttcgagaagccgagcgtcgcataggcgccgttgtacatccccgcgtactggggttcgacgatcagcatgtgcagctccttgtcgtagtagcctttcagctggggtgcgaagtcgcgcatgtcggtcatgccgctgatgagcacgtcgcggtcgttgatgcgcgcgatgtccatgcggaaggtcttttcggacgactgcgaatcgacgtcgacggtcgccgtgacgccgaatgcgccgatgaagtcctccagggtcttcgttcggtcgaaatccttggcgaagtaaccgaacgtcgacgcgctcttcgaaacgaaagccgtgtcgccgaacgagttgtacatcagcagggcgagtgtgtacgtgctgccttcgtcgagcgggctgaacgacgtgccgcggccttcgggggagttgagctgcgcgatcatctcctcgggaacgtcgtagccccgggatgcggtcacctcctccagtgtcatgccgagcgcttcgcacaggtagtcggcgacggcggttttgacgcagagatatttcatcgccgccacattcgcggtctgcatctgccagatgagcgtgttgtagggcgagtagttgaggttgttctccggagcgtagaactcgaattcgagcgatcggggagcatattcgtcgttcggatcgttcgtgaaccgctgcgtgtagagcttgcaggggttctcgatcgagtcgtaggccagcgccacggcggtgtagttgcccgagggaacgttccagaccgaggcgtcgtccgcgaggagcgtcaccacgggggtcacggcctccagtttgtcgtcgatcagctgccggcgcacctcttgctgccgttcggcgtcggcggtgatgtctccggcgacgaccgcggccttgtagtacttcgtgtattcgttgggcgagaagtggagtttcggagccttgaatccggtgctcgtggtctcgatgccctcgaaagcgatctccacgacgggcgtggtgtcgatgtcggtgtcgaagatcagtttctcggtcccctgggcgaaatagcccgacgacacgtagtagatcaggtagaacgagaaggtgctctcgccgtcgaacgtgcagggatagctggcgtacgccgagtcgttgccggtgtaaacggccatgtcggcgacgtagacgtactcgttgtagttcgagttgtagtagccgatcgactgcgccggcacggtgcaggtgttgtcgtcgtggaggacgaacttgaacgtcacgccgctggcccagtccttcagccggaagatattggctcccacggctttctcgacctccaggcccgaatcgcggcccgaatagtacccgttgtagtggtaggttgccagctgggggatctcttcgccctctccggtggtgcggtagagcgtctcccactccagttcgtaggtggccgaaagggtcaccttgtcggagtactgcgccacctgcgcggcgttgtcgcccggacgcgcctcccggctgctgatgtagagcgtggtcttgtagttcgaacccatgacgaagttcgaaaggtcgacctcgacgggaaccgtcacggagtggctgccgtcgggaatggtcgcctcggccggaaccgagaacagctcgtagtcgtcgtccttggtcgccagatagaccttgtaggcgcctttgttgcccggacgcgcgatttcgacgttgatcacgccctgcacggcgtcctgcggaaactccttctggatggacgactggatgaagtggatggccttcgcatcgtccttgttgggggtgtattggtcgccctcctgcgtctggctgcaggccgcggtgaagagcagcagtcccgcacccagatatttcgatatgtttttcatagtgtacttgattttcaacggttcaaaggctcgttagggattctggtcctcctcgttgatgttcggattggcatccagttcggctttgggaatggtcagcacccagtcgtaagtgtcggctttggtgatgttgacgttccggcggttcatcatcgaaatgcactcctcggagaagccgtcgtcggtccggcggtcgatgccctggcccaggcggcggacgtcgaacagccggccgtactcaccccacagttcgatgcggcggtgggtgaggatgttttcgaggaacgatccggtccaggtcgtggtcgtcgcgccgagcagcgtgccgctgcggttgttggcgctgtaacccgggtcgcgttcggccatgacggtgttcatcagttcgcgtgcgctcttgaggtcgtccagccgcagggccgcttcggcggccgtgaagtacatctcctcgacgcgcatgtagatgtagtcgcccaggaaggaggccacgttggcgaacgagaattttttgctgacgtagggcgactccttgtccgaggggtcccaccagtcgcggcggatgtctgtcgcgctgatgcggttgtagagctgcttgctgatcagcttcggcgccgatttggcataggcgccctccttgttgtccatgtgggtgaagaacccggcgtagccgcccgcctggtcggccacctgaatgcctgcgccccacatgacgttctgcttgtcgagcgagttcatgccgcccgtcaggtcgctcttcgtgccgacggcgtagccgccttcgtcgatcacgcgcttggccgccttgaatgccccgtcccagtcgccttccgccagacaggcgcgcgacttgatgcccagggccacgtagaggttgatgtgcgatttgttattctcggccagcgtggtttccctggccttttcgagcagttcgatggcacggtcgatgtcctggtcgatgcggccgtagaccgtgcgcagcgattcgcggggctgtccgcccgtgtcgatcgacgtgccggtggtgtaaaccggtacgcagggctcgttccagcgcgaagcgcccgtcagggagttgtagggggcgcgggagaaccacgtcgccaggttcaggtagcagagcgcccggatggcgtaggcctgtcctgcgacgtaggccacgtcggcctccgttccggccatttccggctcggcgtcgatgatgtagtttacattggcgatccatttgtagttggcgtaccagacgtcgtacgaccggaaggccgacgaagtgtagttgctcttgacgttgtagcagtggtcgccccagaaccagccgttgccctgcgactgcatgatcaggtcgtcggccatgcagtcgagcgccaggttgtaggccgcgatgccgaagcactggtgggtgtttgcggtcgtggaccatccggccgtccacatcgagcggtagacgccgttgaccgaagtgatggccgtggatgccgatttgagcagttccttgcccgaacccgagtcggtcggggagaaatcgagcatcgagtcgctgcacgagggggctgataagccgatcagtgcgatgataagatatattgcttttttcatagttgttttctcccgtggttaaaagttcaggtcgataccgaatgcgatcacgcgcgacggggtgtagctgtaagccaccgatcccgtgaagttatactgcgggtccatgccgtccatgtggttgaacatggcgatgttgtccagcgtggcgtagatgcgcagcgactcgatgtcgatcttcttgagccagcgcttgggaagcgtgtagccgacggtgatgttcttgatggcgaagtacgaggcgtcgatcagcgagttgctggtcgtggcgtacgagccgcccacttcgagcatcggcacgtcggtcttgtcgcccggcttctgccagcggcgtttggcgtttttgtgccagttgttgccggcgtactgcacgtacatcgagccgttgtagagtccgtcgtaaacccatccgccgatcgaataggtcgtcaggaacgagacgtcgatgttcttcaggatcgtgaacgtcgaaccgatgctgccgaagagtttcggctcgcggctttcgtggtagtatttgctcaaggtggccatcgccacgttgtcggtgatgtactcgtcgcagcgcgtgttcaccagcgtcccctcgtcgttgaccgtctgggtccagtaggcgtagtagagctgcttgcccgtggcggggtccacgccggccgttttcggcaggtagaaggtgtagatcggccgccccacctcgatgacgcggatgtccgacgtgatgacatcctggccgcccgtgagcgagagcaccttgttgcggttgaacgaacccatcagcgtcgcgtcccagcggaagtcgcgcttgtcgaggatcgttccgcgcagcgagacctcgagcccctggttgcgcagcgagccgacgttgtcgttgaagcccgtgaatccggtcgagatcggcagtggacttttgagcagcatgtcgcgcgttttgcggttgtagtactcgaccgaaacgcccagtcggccgccgaacatcgtggcttcgatgccggcgttgaggttgccgttcttctcccaggtcaccttcctgttttcgagcttgtcgacgaaggcgcccgcatcggtggcgttgggccacgtgtagtcgtagagaccctgccatgcgtaataggttcccaggttgtcgttgccctgtacgccgtatgaaaccttcagcgtgaggttgtcgagccactggcgggtgttctccatgaactgctcttcggagatgcgccacgaggcgcccaccgaccagaaatggccccagcggtcgctgggatggaagcgcgacgaaccgtccgttcgccagctggcgtcgatgtagtaacggctcttgaagccgtagttgatgcgcgcgaggtaggactccacgccgtagttgtgcgaatagctgttgttgtcggtggtcgtcacggcgggtcccaactcgtcgatcccgccgacgatgccggttttttcgccgagggcgtagttgtacttgtagcggtagtactcatggccggccagcaggttgagggagtggtcgccgaacgtgcggtcgtaggtcagcagctggttgaacgtgtagctcagcgtgcgggtgttggtcttgctgaggcgtccgccctgctgggccgcgttgccgtgctccttgtcgtagaccagcgtgcgctggtagtcggtgtagtccgtaccgaagttcatcgtgagtttcagtccgtagagccgggcctcctccctgaccgtcccgaaggtgatgtagctgcgcgccgaaagcgagttgcgggtgtagtaggccttgttgttgtaaagttcggccttcgagttgaagccctgggccgaggggcggttggcgtagccgttgtcatcctccgatccgtattcgtattgcagccgcccgtcggcgtcgcgcacgttgttgccggccatgtccttcaggtagacgggatagaccggggccatgaactgcgccgtgtaccagacgttcgacgtgcttgcgtcctcgaaactctggtagctcgattcgctgtgggcgaagttggcgttcatgccgatcttgagccagctcttggcctgcgaatcggcgcccacgcggcccgtgtagcgggagaagtcggtgttctggagaatgccgtcttccatgtagtatcccagcgatgcgacgtagttggcgcgttccgaaccgccgttcaccgagacgatgtgttcggtgcgtatggccgaattgtcgctgatttcgtccagccagttctcgttccatgcagctttggcatccgaacggatcttgcccgtcgactggtcgatcagcgtctcccacgtgtaattcttgtacgggttgtagtattcgggattcttcagtccgccgatctgctggccgaggttggcggcggcgtagcggctcgcgccctcgaaatccatgcccgtgccgtattgggcgctgttgcgcagcgcttcgtagctcatctcgacgtaatctttcatgtcgaccaggtcgtagcgggggatggcgcgcgaggcgattccgacgttgcccttgtacgaaatgcggattttgtccttcttgcccttcttggtcgtgatgacgatgacgccgttggctccgcgggcgccgtagagcgcacctgccgatgcgtccttgagcacggtcatcgtctcgatgtccgcggggttgatcgcgctgagcgacccgtcgaaggggatgccgtcgaccacgtatagcggtgtcgccgaggcgttcaccgacccgatgccgcggatgatgaccgatgccgcttcgcccggctggccgccgccggaggcgacctgcacgccggctacggttccttcgaacgatttggtgacgttgcccacgacgcgcttctggagttcgccgcccttgacgacggcggccgaaccggtgaacgactccttcttggccgtaccgtaggccacgaccatcacgccttcgatctcggcggtgtcctcccggagcgtgacgtcgatgcgggtcttgttgccgacagggattttctcggtcttgtagcccaggtaggagacgacgagcgtggcgttggccgggacgttcgtcagggtgtagtctccgtcgacgttcgtcgtgatgccctgcgtagtgccctccacgagaacgttcgcgccgatgatggcttcgccgttggctccggtgactttgccgctgacggcgacgttctgcgcccaggaggccgtcgtccatgccagcgacaggatgcaccagagaattgctgctatcttgttcatagatgtactcttatttgatgttgtgcgtgttgtgaatgatggtccagaggtcgccttcgggtttcgctccggcgggcagctggacgctctccatcgggtagatgaacttctcggggttggcgatgggtttcccggcgggcgaccggagcggttcgtccgttcgggttgcggcctgcgccttcgcccgggcggcgtccggagccgcgctggtggtcgccgaaccccatttggtgactttgtcgccgaccgtgttggtcgccgtcgccatgaagacgtacgtggtttcgggcgttacgccgctctccccggtgaagaggatggcaaagccgtttccgttgatgtaggggaggtactcctccttgaggtcgtgtccgaactcttcgatcacggccggatagttgtccgtgctgacgttcgccagggcgctctgtttgaaaatcgcgtaacgcaccgttgcgatgtcgatgcccttcatgacgccggccacggtgttgtgcgtcgggccgtagttggcgttggtcgaggctgcggctgcgaaccacgcggctgcggccgtgctggtcttcgtggtgacggagttgacgcagaccgtttcggcgccgctcgacgaggtggccagcgtgagcagcgtgtaggacgtgccggcgctgactccttccgtaagtccgttgtaaccgtcggcgctgtttaccgtcgccgagagcagctcggggttgaactggactccgtaattggggtctttcaggaatgcggcgatggcctgttggtcgtagggatcggagaagacctgattgaagagcttggtcgtcagcgtacggtaacggacgtccgtcacgtcgtctcccttccagtgggtccacacggagttggtccagccgtaacccgtcagggcgaggtaggcgttggtgatgtagaaccgctgcgtgaaccagtcgctgccgccgtagttcggaccggcggagtagccgtcggccgtggtcttgaactgcgtggaggagaggttcgaggtgatgttgccccgcaggtccatgccgaaggcgaagatcacgtagctcaactcgggggtgagtcccgtcatctggaggctctgggttcccgacttgagcatcgaggccatggccagctggaggctgatgccctgctttttggcgtattcgacgatataggtctggaaggcggtcatcagctcttcgggcgaatacttggcgaaggtcgtggccgggagaatctcataatagtaggtttcgtcgctggaggcgtagatgtcgaacgccacggcgtcggagatgatcgtcgtcggggcgatgaccagcggcggaacgtcggcgtccgaggtgacgaacgagagctgtgcggcttccgagttggtgaagcgcgtggcgtcggacgtcatggcgcgcaccgagaaggagtaggtgcggcccttgtcgagtttcgacaggatgaccgtacggtttcgggtggtcgacacctccccgccgtcgaccgagaactcatagagttccgcttcgggcacttcggtccaggagatgacggttttcgacgcataggcgctgccgagcgtgatcttcggctggggaagctgctccagatcgtcggtcagcacgtggatgtaggtgaagggggattcggtgtattcggccgggtcccgggggcaggccttgaccgccacgacatactctttctgccgttccagactgttgaattccagccggcagccggttgtcgaggtttcgctcccgccgtcgaacgtgtagacgtaggaccctgcgtcgtcgacggcttcccagcggagggtgaatccggtggtcgtcaggtcgctgacgatgatctgcggctgtgcgacgggttgcaggccggagccggtctccgccgcgtcgtcgtccgacgagcaggcgcacagtcccgcgagggccgccgccgcgaatgccgcgtatttataaaaggttttcataggtttgattctcttttgcgttagtgaatgtgtcattcgacggttacctcgatcggtttgcgaatggccgcgccgtccgagacgatgatcgtcgtccggcctttcttgaggccggtgagcttcatcactccgccccgaagttcgatcttcacgaggtcgggaacggaaacggtgtaccccaggacattggtggcggtgaagtggttgctcaggtcgatgctgacggtgtcgcccacgccgacccgctgcgccgggatgccgtcgatcttggcgatgttccgcagcagcttgtaggtgtcgaggctgccgatgcccatgttgcccagatactgctggtatttgccggtgcagtagcggtcgacggactgggtgctgctcaacagcgcctgccggagcatttcgcccgtaaggcccttgcgtttttcagcgccgtagtaatagctgacggccagcgcgcaggctcccgacacgtgggggcaggccatcgaggtcccctggctgccttcgtagcccgaagagccgtcggcggccacgctcgtgctgtaaacgccgccgtaggcgttgctcagcatctggtcgccgcccggggccgagatccggacccatgtgccgtagttggtgtagtaggccggggcgcccgtgaacgcggttgcgcccacgctgatcgcgttggcgtcggcggcgggatagcagacctcgctcgaagcgtcgttgcccgcggcgaagaggacgatgccgccggccatcgggcctgtctggttgccgttttcgtccagtcccgcatatttgttgaagtactccatggcacgcgagagcgccgagtaggaaccgcgtgtccagtcggtcacggagatggttccggcggtgtatccccagctgttctggcagatcacggcgccgttgtcggcggcgtacttgatggcgcggatctgtccggccagtccggcgcccgacgatccggactccgacttgccgagaatctcgcacgacatgatcttcacgccgtcgcccctgcccgagccgcctgcgatgccgcagacgcccacgccgttgttgttcacggcggcgatcgtgccggcgacgtgcgtgccgtgcatcagttcggccgagaaatccagttcgccggtctccttggtgaagttgtagccgtaaatgtcgtccacatagccgttgccgtcgtcgtcgacgcccggcgtgccgttcagttcggcctcgttgacccacatgttggcggccaggtcttcgtggtcgtatttgacgccctggtccacgacggcgacgatcacgtcgggattgcccgtcgagagctgccaggcggcgtatacgttggcgtcggcgcccagctggctcgtctgcgcgaagatgtttcccgtgttgttgtagtgccattgcatctgctgcgagcgttcgctctcgttgaacgggaaggggacgttgcgcacctcgtctgcgatggcgcgggtgacgctctgcgccccggcggcgggagatgccgcgcggcggtggtccgaagtttcggcggccagcgagtattcgatgatttcgatgtccttgcacgaagagagcaggctggccatctcgctcgtcgggaccgacgggtcgtatttggcgtaataccagaggtgcaggccttccctgcgggtgcgttcttcgaaacgcccgccgtccgggaagagccgttcgaaacgtacggtgttcaccgtgttgaggatgcggtcgatctcgtcgatgccgctgcctttcgaaacgccctgcgcgcggctcttttccacgatgccggaggcctcggtcttcagtttgaggatgatctcgccgccgatggccgccggggaggcgttgacgatgacgggacccgcggtctcttcgccgccgctctgcgtgtcgtccttggcgcacgatgccgccgcgaggacggttgccgccaggagaagcgatttgaatggatatttcatagacgatcagtttttagtgttattcccggatgcagcgtatctgtgcggaacagtcgtgctcgccgagtctgtaattgcaccagttggggttgaagttcacgaagtaggccgatgacttcgtcgcgtcgggagtagcctgggcggtccagtagaatgccatgccgcccgtgtagttgcagatgctcaccgagatgtagtccgtgtagtagatgttgccggccatcgggtagtagtcgccggtgtttttccagcggcgcccgcagtcttcgtaggcgttccagtcccatttggcgctgacgccggtttcgtcgtaatccgccgctgcgccgccgttggtgatcgagttgtttccggcgggaatgccccagagatcgggtcccgggaccttgtagcccggagggcaggggtcgaaaatggtcttttcgggaccccacagtcccggatgcgtggccttcgggtctgttcccgtgcagtaccagtcggcgtggccgttgtacggcgattgcaggtaggtcatcgggttcaggatcgaattgggaatgttggccggcggcgtggcgagcacggcggcctgcgcgttgtagacccatgttcccgttccgtcgccgatcgcggtgttcggttcgttgtaggccgggacgttgttgccgtcggtatccgcgtggtagggcgagcacgaaggcgtgaaggggtccttgcggccccattcgtagaacatgcctcggttgcccacgtccatcggggtgttgttcagcgctccgaggttgcggtccatgatcacggcggcgactttgccttccgagtcgatgtggtcgtgcgccgtgatttcgtcgttgcagacccagatgtgccagctccagacgatgttgcctttgatgtccttcacggcgatcacggcgttgccctccgaacgccccgtcgagaaggtcacgtagccgccccggtagatcggcgcgccgtcgatgatttcgcgcgacatggtcttgtcgccgtcgtggcgcgattcccagagcagttcggcgaaggcgccgtcctcgatggcgagtccgtagttggcgatgtagtcgctgactccgtcgccgccgccgttgcccttgaccgatgcgtcgaatttgtagacgccgccggtccgggcgatgtagcagttggccgtgccttcggcgctcaggttgacgctccgttcggcgcgctgtacgagtgcgacctcctgcgaaacggtctccccgttcttctcggcgctgaccgtgagtttgcccgtcagggtttcggctccggcgttgatcagggtctcgaccagcagggcgttgccgtcctgccgggcgacggtgaaccagtcgccttcggcggcgtagtcccagccgtcggcgttcgtcgccacggtgatcacggcgttgcctccgtcggcgtcgaagatcactttttggctcgacacctccacgtaggccttgctttcgccctcctccggccatatccgggtggtttcggtgcaggctgccagcagtgcggccgacagcactgcgatgctgcatattatcatatttttcatgttcgggatcgttttgtgttcgtctattccttccatgtggtggggatcttgtcgtagtccgagagtttcgtacatcccgcgaaactgctcttggcggcggtgatcgcggtgagtcccgaggcggcggcattctccgccgtgcggtcgtacaggtggtatttcacaccgtcgacgaccgtgtagggcgattcgccttcgagcgacgcgcagccctggaaggtcgaagtcagcgtcttgagcttcacggcttcgtcgaacaggctcaccggaacgctcctgagcatcccgcaatcgcggaagagattcgcgacgctggtcagtttgacggggctgaccagcatgttcttgccgacctcttcgagcgacgtacaaccgtcgaagaccgaattgaacatggtggccgaagcgcagttgaacacctccgacccgacgcggaccagtcccgtgcagtcggcgaacaggctggtgtaggttgaaatctgcgtggttttcagcagcccgtcggggatctcccggagtgaggtacagttgaggaatgccttctggaaattgagcgacgtgccgttcagtcccgtgaaggcgtccggcgcgatgctttcgattcccgagcagccggagaacatctccgtcagggtcttcgtcttggtgttggcttcgaacaggcgcgagggaaccatcgtgaggcgggtgcagttcaggaagcactgggccacggtggtcgcgttgacgttcttggcgaagagccctgccggaatcgtctccagggcggagcattcggagaacgtgttgttgaaggccgtcgccccggtcagtccgtcgaagattccggcgggcacgctcttcagcgccgtggcccctgcgaagaggcggtcgcatttggccgaggccgtgctcttcccgaagaggaggccgaccgattcgagggccgtgcagttctccagggcgttggaataggtcgtcactttcgggttgccggcgaacagtccgtcgggcagcgtcgtcagtgcggcgcagttctggaacaccttgccgaaggtcgtgacggagggattgcggctgaacagaccggcgggagccgttttcagtcccgacgccgcgaatacgctggtggcggtcgccagattcggcatcccggcgaaaatatcctccggaacgctttcgagcagcgtgcagttttcgaacaggctgccgatgctggtgatcgcgggtgcgccggcgaaagcctccgcggaaacggttttcaggttgtcgcagtccttgaacatcgaggagatattcttgcaggcggcgcagccggagatgatgttggcgccgatctcttcaagccccgtacagcctgcgaacaggcccgagaacgaggtgactttggaaagtccgccgaggacgccttcggggatgcttttgagcgaggtgcagtctttgaagacattggtgaacgaggtgaccgccgtattggtggcgaacagccctgcggggagcgtcgtgagcgacgcgcagccgttgaaggcgtcgttgaaggcggtgaccagggtaaagccgtcgaacagccctgcgggcacttcggtcagcgaggtgcagtccttgaagatgttgttgaaggcggtcttcgtcacggtcgtgaaggctccgctgcttttgaacagctcggccgggacgctttgcagttcgctgcatccggtgaaacagctcataaaggtcgtcaccttgccgcagcctgcgaacaggtcggcgggaacgctctggatggccgttttgctgaatgcgctctggaaattggtgaccttgtggttgttggcgaacaagccggccgggacggatttcaggcttgttcccgagaagagcatgcggaacgagtcgacctcggggttgttggcgaacaggccggccgggacggattcgaacgactcgctgttggcgaacagcgagttgaaggtcgacaccttcttgttgttggcgaagagtttttcgggaaccgtcttcagtttgccgttcgagaagatgatcgaacagtcggtcagctccgtgttgcgagagaagaaatcctcgtcgatctgggtgatcgccgtgccggagaagagcgaacctaccgaggtgatcttcgtgcagttgtaaagcaggtcggcgggcacttcggtgaccatgttgcagttctggaagcagtaggcgaaggtttccgcctcggttgcatggtcgaacagcccgtcgggaacggcttcgaggacgcggcagtcggcaaatgcatagtggaaggtggtgaccttggcgaaggcttcggtgttgtcggagggaatccgtttcagctcgcggcagttctggaatgcgcgcgccatcgaggtcagccccgtgcggccccagttgtaaacctccttgaactggttgcccagtccgtagtcggggatgtcgtaggagttgagcgacgtcacgttgcccttgaccgagacgatgtagtagcccgggtcggtgtaggtgtgcgaggggtaggcggaggtgacgttctcctcgatgctgccgtcgccccagtcgatggtggcgtcgatggccttgtcgaacggcagataggtcttcaggctcgacgaggtgatgtcgattccgaggatgaaggcgtcgaggtccagaccggtctgggagacggtgacgacctgttcggtctggttctgtttgccgtcgccggccgatacggtgatggttgcggtgcgggacgatccgctcgaattggtctctgcggtgattgtaagtccctgctcggttttcgtggcggagagccagtcggaattttcggaaagcgtgtactcccagtcgtagttggatctgattcccaactcttttttgtcggattcggtgggagtgggcgagaggggaatggtttttagcgaaacgttgacgtagacggcgcggtcctgcgtgacgcggatcgtttcagagacgggattaccccccccctcgccggcaatcagcacgaaggtcgtttcgcggtcctcgatctcctcgttggggtcgagcgtcatcgtgactttgtcgccctgctgttcgagaagcagccacgggcagtctttggtttcgaagatccagtcttcgtcggtcgactgcacttcgaattcggcggtcagttcgccgatggcgggaatctggaagttgtttttcgatgcggcgatttcgagcgtgccgtacgcgttctgcgtggcggagatggtcgcggtcttgtcgccggcggtaatggtgatcgtagcctgctgctgctcctcgaccttgttgccctcgcagttcaggacgagctggtcggcgacgtcgtctttctcgatggtcagccagccggcgttgacggcgtcgtatttccacgtcgtgttggtctggatgtccacgacgacctctccgcccaggctcttgaagccgatcgaggcgttgcgttcgtcttcagcggcgaaccatgtgtttttcgacgagatgcccagttcggccgcaatgccggacggttcgtcgcccgggacggggttggtgtaggtgatcgtctcttcggagcaccccatcatgccgagcagtaaagctgtcagtgcatataattttttcatgtgtgctgcggtttaatgtttcgatacgggaaaggtgctgcccgagggtgcgatgccgtcggcggcccgggtgacggaggtcggggccgtgccggtgtcggccggaatgtcccagtctacgagatacatcgtgccggtggcgtagtagaggtcgccgaacgacagccactgctgctcctggtatccgatgatgcccagcgtggtgtacggcgattcgaaaccgttcaggaggatcgccttgcgggtttcgtccgcgtcgtcgttgtagccctctcccagcctgccggtcagcatgccgttgtggaaacctccgccctgcatgttgatcgagtacaggtagtggaagcgggagaccgtcggggagatctcgcgggtgtagcagagcctgcccagttcgatcgacatggtttggctgtttttgtcgtaggtggcttccacgaccgtgcccgtcaggaacaggttcttgatgtagaaactcttgcggtactctttctcttcgacggtgcagaacgtacccgtgccgctcacgccgatcggttcacggccgtaataccagttttccgcatgaagtccgtaatatcccagcatttggtaataggggttttcctcgcgtgagatttgcgaaacggtcactttgcaggattccgtagcggagcctttggtcgcccggacggtgagcgtcgcattgcggtgggcgtcgggattgcgcggggcgccgacgcgtaccgttccgctgaccgggtcgctttcgaccgaaacccagtcggcgtcgctcgtgacgctccactggccgttggagaccacggtgaagagaacgctctcaccttcggaatccagcgaaatttcctccgaagcggtggtggacagcaggaccgtttcccacgagaatgcctggtgaacggcgatttcctgtttgtcgccggccgtttccacggtgattttcgagttgcggacattgtcggtcgtattgcttgccgcggagatggtcagcaggccctcttcggaggccagcgtcacccaatcgtccggacagctcaccttccagtcggagggcgtggctaccgcgacggtggtcgttccgcctttctgggcgaacgcgacactacttcgcgagaggacgatcacatccgcgacctcctctttgttcttgtcgtcgcagccgcttgaggcgcagaggacgagaaccgtcaatagcgtaaagcatcttctcataaaaattggattaggaataaaaaatgaatgggtacggtatcccgtttccggagaaccgtatttgctgaaaattgcatcgtgtgaaatttttggacttgtttatttgcggcacaatatacgaaaatttgcccgaatgctttctggaaattctgaaaatattgtcgtaaaagtcttttcttattgtttgtttttcggtgttatgcgtgtgtataaggttgatttttaatgattttgaagaatgacagccgttttgcggctgcaactgttttgtttgtcggatattgtcgtcgcagagatatttccggtccggtgaaaaagaagtgtatttgttatatattgaccatttggggcgtaagctgttgaatgataattgataatgtccgtcccggcggcggttcccgcgattttccgtccgcgacgtcccgatattgaccgctttttgttacttttgcaaaaagaaaaaaatgaaactcgtcgaactgttagctcctgccaaagattacgctgcggccgcggccgccgtggactacggcgccgatgcgatctatatcggcggcgcgcggttcggcgcgcggcaggccgcggggaactccgcggaggagatcgcccgggtcgtggagtatgcccaccgcttcggagtgcgggtccacgccacgcttaacacgctcgtgtgggacgatgaactggaggccgccgaacggcaggcccgcagcctgatcgacgcgggcgtcgatgcgctgatcgtgcaggacatggctctgcggcggatggaccttccggtggagctgcacgcctcgacgcaggtttcgaaccgcacgcccgagggggcgcggttcttgggcgaggcggggtttgcgcgggtgattctcgaacgcaacctcacgctggaggagatccgggccatctgcgccgccactgcggccgaggtcgaatgcttcgtccacggggcggtctgcgtggggtacagcggccgctgtttcctctcgcggtcgatgtccgcgcgcagcggcaatcgcggggcgtgcagccagccctgccgcctgacgtgggacctcaccgacggaaagggccggacctggattgccgggaagcatctgctgtcggtacgcgacatgaatctttcgcaacgcattggcgatctgttggatgcgggcgtcacttcattcaagatagaaggtcggctcaaggatctcgcttatatccggaacgttgtggcccactaccgccgggcggtggacgaggcgctggccctgcggccggggctggtgcggtcgtccgtcggcgagagcgtcccggatttcacgcccgacccgtcgaagagttttacacgcggggagtccgactattttctggacggaaagcgcgccggagtggcgtcgttcgacaccccgaaggcggtcggcgaacgggtgggccgcgtggcgggcgtttcgggcggcacgttcacgctcgacggtgcgcacgatcttgcgccgggcgacggcatctgtttcctgacgccgcgcggcgtgaccgggaccaacgtcaacgccgtggagggtcgccgcatcacgcccaatcgcatggaggggatcacgcccggggcggaggtccgccgcaatttcgaccgccgtttcacgctggccgtggagcgcagccgcacgcggcgggtgattccggcgaaggccgcggcggaggcgacggccgaagggctgaaactcacttatacggattgcgagggcgttgcggcctcggtcgtgcgggccgtgcggctcgacccggcgaagaatcccgacgccaatgccgccgcactgcgtgcgcaggcgatgaagtcgggcgacacgatcttcgcggtccgcgaagccgaagtgcggggcgcggagtggttcgtgccggcgtcgctggctgcggaactgcgccgcgaagcgttggcggcacttgccggagcgcgccgcgaacggcggccggaacaccgcattctgcccgagaatcccgccgcgaaatacccgtcggaacggcttgcggccgaggagaacgtcaccaaccggctggccgaggcgttctaccgcgaccacggggtgcggcagatcgaacgggggctggacctcgcgtcgacgaccgccgggcatgtggtcttgcgttcggcctactgtatccgccgcgagatcggcgaatgccttcgggagcatccgcggctgcgcggcgacctgtttctggaacacggcgcctaccgttaccggctggcgttcgactgcgaggcctgcgaaatgtcgctggtcgatccgcttgaaaagcgggagccggaaggtgtgtaactatttataaaataatgtatgcaggaacagctgacgcccgatttcggggattatgaactcctcgacacgggggatttcgagaaactggaacgcttcgggcgttatgtgacgcgccgtcccgagccgcaggccatctggaggcgctcgctcgccgaagaggagtggcggcgcatggccgacgcttcgtttcggcgcgatgcgcgcagcgacgagcggggcgaatggcgtctcgcgcccggaatgcccgaccgctgggtggtggagtatgcctataagcggatgcggctgcgcatgcggctggggcttacgtcgttcaagcatgtgggcatcttccccgagcaggccgccaactggaatttcatctacgacaactgccgggctttggccggagacggacctactgatggcgagcgtgttgcggctgtcggttcgggcgttgcgcgaggtggcgcccccaaggtgctgaacctcttcgcctatacgggcggggcgacgctcgcggcgcgggccgccggggccgaggtgacgcacgtcgattcggtcaggcaggtggtgacctggtcgcgcgagaacatggagttgagcggcctggagggcgtgcggtggatcgtcgaggatgcgctgaaattcgtccggcgcgaagtgcgccgcgggagcctttaccgcgggatcatcctcgatcccccggcttacgggcgcggggccggcggcgagcggtggattctggaggacaacatcggcgagatgctggagtgctgcgcgcagctgctcgaaccccggggggcgtttctggtgctgaacctctactcgatgggcctctcgtcgacgctggcacgcacggctgtgaggcaggcgttcggcgcgccgcgcgaggagcagtggggcgagctgtgtttcaccgaccgggccggcaagcagctgccgttgggaacctattaccggtttacgcggtagggtttgcgggggggcgcgggggatgcgctgtgtttttggcagccgtcctcaagtcggaatcccgtgtcgcgttccgcggcgcaggcgtaagacgccggttctatgaatacgagcgcagaacggcagttgcagactgcgaaattgcagcggccgaaaagggcataagaaatcggtttcaacttgccggggcaagttggcaggccgcagctccggcctgcggaggcccgccggttttaggagctcccggaggcttcgttcctttttcctttcggttctgcgcccgtgagtttagacggattctatcaaccttaaaacacgtgatatgagtattcttgcagtgatattcggaattttgagcggctgtttcctcgccgtgctggtgggcatcatcggcagccaccgccgtatcggcttcggctgggcgtttctgataagcctgatcttcacgccgctcgtcgggctgatcgtcgccctgctgaccgatccgctgcccggcggagggcagcgatggggttgtgtcggaaccgtcgtcgccattctggggctgttgttcttcgccgcgttcctgctgctggcgctgacgggcggggccatgctgctggccctgtgaaaaccggaacggagatgtccatacccctgcatcaggccgcccggcgcttcgattccgggatattcctcaaagaaggttcttccaccgaagtggaagaaccggtcgggtatgcccaccgggacgactacggcgattgagcactcctcgtcggcgtgatctttacaccgccggtaggactgatcgcggggcttttgaccgatccgcggacacttgatctactggtagcgtttttccagctcggcaatcattgtttcgagcttttcttcattcgtctcgaagtagcgtgagtcgaaagccctcggaatcataccgagccagttccgcacctttttgctggcgagcattttgccgaatgccttgtcgatattcgtatccgcagaccacaaggtttcccccatctgttcgggcaggatggctttcatgcgctggtcgtagtagatattcatcgagttgtcgaatgccccgagttcgttgtagcagcgcagaaggtcgatgacgacctgtttgtcggcgatgtcggacgcgatgcccgtcgtcttgaacatctccagcgcgtcggtcaggaagcggtagggttttcccatgctgccggtgatccgccgggtatagtaagctaccgtatcggcgggaaggccgtcgagcgagaaatcatgctccttcaggcggtatgcgacccgtttctcgtcgttgtacatccatttgtaatcctgtataacttgcaggttgtcgcgcagttcgagcgcaacgagctgcatggcctgccgcacctccctctgttttgccgagtcggcgattttggccgtcagccacagcgtcagcagcacgccgcccgtaacgatcgagaattggcggacatagtcgccgatattccactttttaaaccggttttttaaggatttcttcatggtgtgtcggattagaatacgtaataaatcaagattcccgccccggccgagaggacgatcagcaggatggggttgaccttgcgccacgaacccacgaaaacaccgccgaagagcgcccagctccaggcgtcgatgaagttccggtcgtcggggttgtcgccgtgggggaaaatcagcagcagagccgcggcggcgatcatgccgatcaccacgggccgcatgccccgcatggccccttcgaccagccggttccctttgagtttcataaaaaaacgcgccacgaggatcatcagcgtcagcgacggcatgcagacggcgaaagtggcgattgccgaacccaggatgccgcaccaggtgtgtccggtctggacgccgacgctgtaacccacgtaggtcgccgagttgatggcgatgggaccgggcgtgatctgcgacacggcgacgatgtcggcgaattcggcggcggtcatccactggtgctgcacgaccacttcgttctggatcagcgacagcatggcgtagccgccgccgaatccgaagaatccgatcttgaggtaggatatgaagagttgccagaggatcatagctgcgctaattaagaattaagaattaaaaattgggagtcggcatgtcccgcaggcggtctctgccctcgctcaaccgcaaaactcacttttcacctttcacctttcaccttttttgccattgtcaactcccaggcgatgcccagcgcggcggccgcggcgagtatccagatcggcgaccagtcgagccaccagatggccagggccgaggcggcgatgacgaccagcatcgtccagtgcatgccgcgggagagcgtgagcaccgggccgatgatcagcgccacgaccgccgggcgcatgcccttgaaggccgcgtcgacgacggggttctggcggatgccggcgaagaagatggcgatcacgaggatgatgacgaacgacggcgtcaccgtgcccagcagggccgccgccgcgccgcgcagtccgcggaccttgtagcctacgaataccgcggtgttgacggcgatcgggccggggaccgactgcgcgagggtcagcaggtccaaaaactccttctgctcgatccacttgcgtttggtgatcagctcgcgttcgatcagaggcagcatggcgtagccgcctccgaaggtgaacatcccgattttcaggaacgagacgaatatggttgtcagccgttgcatcgtcattggcgggttttgcggcccagcaggttcatcatcccgtcgatgtaggtcatcgggtgggtcggtgcgccgggcagccagaggtccggggtgtgggtgtcgaagaacgtgcggtcgacggcgcggctgtcggcgaaaagtccgcccgagcaggcctccgaaccgcaggcgacgaggattttgggttccgcgacggcgtcgtagcagatttccagcgcctcggccatgttggccgtgacggggccggagaccaccacgccgtcggcatggcgcggcgaggccgtgaagccgatgccgaagcggccgaggtcgaaattgacgttgcccgtggcccccagctccatttcgaccgacgcgtcgcccccggccgagacttcgcgcagctgcaatgcgcgggagaagcagcggcggatttcgggacgcacctttccggcgtcgaacgctatgcgggggtcgcccggacggacgacaagtccttcgcgcgtgggcgagccgatgcggtagtcgttggtgaaacggacgttgcggggcgcgatgcgcgcgcattcgccgcagaagaggcagcggcccaggtcgagcgcaaggggcgcggccgtgaaggctcccgtggggcagacggccgcggcgtgctcggcgtcgtcggcgtcccgggtctcggtcaggcagggacggccccggaattcgggggtcagctccacggcgtcgaggtcggggatcgcctgccgtccgtggctgtgcagtacgcgtatttttgggaggatcatttttgaataaataattgaacaaaattaacgaaaagcctcgtgacggccaattcttttccgggcattaagtccccgccggggcggggtggagttgggtccggtttgtaaacgcggcggtacgcagcgaacggagtgtatgagggttgccaaacggtgcgattacagatcatggccgcagtacgagaggttgaaactcttgttgcagatcgggaagtcggagatcccttcgccgcgcacggcgagcgccagcgccagccagttgtggaggctcgggtccttgatgcgggcggcggcgatgcggccctcggcgtcggtcaggagaacgtggcaggtctcgccgcgccatccctcaaccagtccgaacgcgagcgacgagggggccagcggcgccgcatagtccgggcacgggtgtccggcgttcccgcattcctgtccgtgaaggtcgagcaggcggtcgatgtattcggccgattgcagcacctcgcggcagcgcaccatcagccgggccatcacgtcgccatgcgttttgacgatgctttcgtggcgcaacgccccggcgaagacgccccaggggtgcgacgtgcggatgtcgcgggccagaccgctcgcgcgggccgcctgacccacgccgccgatgcgctgcatctcgtcgcgcgggacgatgccgcactgttcgaagcgggccagcagcgagggcgacgacttgatgtcgcggcgcacctggtcgtagcggcgggcgatttcgcgcacgttcgcacggatcatcgccgccttttcggccgtcagcgggtggtcggtgccgaggggccggatcagccccttgccgaagcggttgccgcaccacgcctgcgtggtgttgatagtcatggtgcgcagggcctccgaagccacctgccccagctggtagcccacgtccatgcagagagcgcccgtgtcggcgatctgcatcgccatgcgttcgagttcgagggccgcggcgcgttcgcactccagcgcggccgggatttcgcggcgggcgagtttctcgacggcccgggcgaaggccgtggcgtgcgccacggcgctgtctccggcgacggactccgcaaggcacatctgccgcaggcggttcgcggtcgtttcgaaggccgtctcgacgtcccggtgctggtagcccagcgcgatttcgaggtgcaggacctgctcgccgttgcagatgaagcggaaggcccccggttcgatgacgcctgcgtggatcggcccgacgttgacctcgtgcagcgagcgtccctccatcgtgtagaaggggtagttctcgatcgaactgcggcggtcgtaacgcccggcggggaaccgcagcggcttgggccacggcatgccgtcgaaacggatgccgtagcgttccgagatgtcgcgctcgaaggggtgcatctgcgggtgcagggctgtgagcgaggggagcgccgtctcgtcgtagtagtccgtggcgtgcgaagtgatcagcacgcggcgctcggcgtcgtcgagcagcagcaggaagaaacgcatgcggtcgcccgacgggagggcgaaatagtgggccgcatggtagcctgcgtcggagagttttacgcgaaggtcctcgtagaaggcggcgtaggagacttcggggatgtcgttcagcgcgacggaggcgccggtattgtcggttacgtagtaattcatagcgatgcgattcggtcgatcagttcccggaaaaatgcgggctgccaaagccccagcccgatggcggcggcgagcagcgacagcgccgaccacgacagtgcgcggtcggtcgccgaggggtgcagttcgtcctgccggggctggtagcagaggcgcagcaggcgcgagcagaagaagtagatgaccaggcacagcagcaacatgatgcccgtgacgagccaccagcggccgtcggcgatggtttgcttgaggatcatcagctcggagaggaacagcggcgagggcgggaaggccaccagcacaaccatccccgtgagcagtcccacggcccccacgcggttgatgtggatgtagtcgccgatgcggttgatgcggtagttgccgtagacctgccgcacgacggcgatctggaggaacaggctgctcttgatgagcgtatggcagacgacgtggaacacggcggcccagaccccgatgcccccgatgcccagcccgatggccgcgatgcccatgttctcgaccgtggagtaggagaggaagcgtttgtagttgttggtgcggcgcaggaacagcgcgccgaccaccagcgacagcacgccgacgagcagcagcacggatttcacccatgggaagacttcggtcgcggcgagcagtttgtagacccgcagcaacgccaggaacccggcgttgaccagtcccgtggagatcagcgccgaggccggggccggggcggcgaagttggcgtcgacgcccacggtgtagagcgggaacagctcggccttgcagctgtaaccgcagaggatcagcagaaaggccgtcttcaggtagagggcgctgccgcccggggccgcggcggcgacggtggcgtagtcgagcgactcgcagtcggtggcggcggccagcagcaggatgcccaggtaggccatggcgatgcccgtcgagcagacgaagacgtatttccacgccgcttccagcgcctgcgccgtgcggcggtggtagacgatgcccgccgagcagagcgtggtggcttcgaggaagatccacgtcacggcgaggttcgaggcgaaataggctcccgcgatggctgtggtcaggagcatcagcaggcccgcgtaggtgcgggtctggcgcaggtcgcagtcgtggaggctggccttcgagtggaaaaaggcgaaggcggagacgatgcagagcaggcagtagaagagcgtgcccgcggcgtcgaaggcgaaccacacggccgaggtctcgccgtaaagccctccggcgacgatccgaacggcgaaggccgcctgcacggcgtagaaggccgcgcccgtgaggcgcagcaggctccggcggcggaccgtgaaggccgctgccgcgatgaggacgctgaaaatgaggtagcagatcatggcgtcagtcctttacgttggtgagtgaatcggcgtcgtcggcatggagcttgccgtcgattttggtgaagaagatgcccagcatcagcaccgagatgaggatgtcgagcaggatggcgaagttgatcagcagcggcatctcgacgccgatagccgtcgaaaagaggaacacgccgttttcgatgaccagaaagccgaccatgtgggagaagatccggcggcgcatgacgatcaggatcagtccgctcagcagcgagtagaaggccacgccgaagaacaccaggtcgatggtcgtgtcggcgatgtaataggtgaccgaggcgctcacggccagcgccacgagcgacagcagcagcgagccggactgcgtggagccggagcgcgagacgcggttgatcttcgtgcggcggatgacggcgaaaagcagtcccgggacgaggatgcccttgaaaagcagggtttcgaggcagatgaaggccagttcggcggggttgatggcgtgcagccgcaccagggcgacggcgaacagcagccacccctgaaggccgatcagcgaggcgaaattgcggaaacgctcggtgatcgccagatagacgagcgtcacgacgtagaggatgatcagcggaagtatcattgcagaccgatgttaagttgcagcaggtagcccgtgaagaacacgaggacggccagcgccgcgacggtgaggatgaaggtggtgttgcgggcgagtttgttgcgggcctgggtcgattcgacgatgcccaccgaaagccccgtgacgagcaccgcgagcggggccgccgcccaccagcgggggcagcaggtcgcggcgacggcgtcggcggcgagcaccgacagcgcggcggtcttgagccatccgaccatcttgatataggccaggtcgacgccgcagtagtcgaggcacatcacttcgtggatcatcgtcagttcgaggtgcgtgcgggggtcgtcgaccgggacgcgcccggcctcggtgaagacgatcttcacgagcacgtaggccgccagcagcagcaccacgaccagctgcatgccgttcacggcgtcgcccgagaagatcgcgtcgaaagaggtgtagcccgacagcagggccagcgtgccgaagacgagcatcagcgccggttcgaccagcgcgccgtacagggcttcgcggctggcgcccatgccctcgaacgagcttccggtgtccatcgccgcgaggatgagggccacgcggcccagagccaggaggtaggcgaaggcgatcaggtcgccttcgaacgacagcgcggacggcaggtcgcctacggggacgaacagcgcggcgacgagggccgtgccgagcgtgacggacggggccgcgcggaacacggcggtcgtcgtgggggagtagacggcgcccttgcgcagcagcaggcgcacgtcgtaaaggtgctgggcgaagcggatgcccttgcggcccgcgagcagcgcgcgggtgcggttgatcagtcccggaatcgccagggccgccaacagaaaaaggagtgtgttgagtgctgccatcttaaatcgcgttaaataccgacaacaggaacaccagccccaggaaagccagtgcgaaaaggatgtaatggttgatcttgcccgtgcgcaggcgcatcacgcgctggttgatcacgcgcagcagttcgacccaccaggcggcgaacagccggccgatgcggtcgcggtggccgatgtcgaacgagtgggccgcggggaagatttcgcctttgcccacgggggagccctggccgctgttctgggtcagcgacgtggcgatggattgaagcccttcggagaaggattcgcccgtgtactgcatccggacgttcggcgccgtgaagccgcagccccatgtgggacccttggcgacggtgcgcgtgcgcagcgtccggcggcggagccacagcagcaggcacaccacggcgatcagaatccaagccgtgcgtcccgcggcggcgagcggcggcgagagcagccagtcggcggcgtcggccggggtgcggaggaagaagcccgcggcacgggtcgcggccgagacggccgcccgggggaacagccctacgaaaaggatgcctgcgagcggcagggccatcgccgcgatgcggaaggtgtcggcctcggacgactcggcgacctcgtgggtgcggggcgagccgaggaagaccgtgccgtagagtttggtgaaggccaggacgacgagtccgccgatcagcgccagcgcggccagtccggcggcggacgccagcacgttgctgcccgaagcgatgccgtcgagcatcccgaggtagatcagcagttcggagacgaagccgttgaggggcggcagggcgcagatggccgccgtgcccgtgaggaagaggatcgccgtgagcggcatgtgcttcgcaagcccgcccagcgcgtcgagcgacgtggtatgggtctgcgagaggatgttgcccgcgccgaaaaagagcaggctcttgaacagcgagtggttgagcgtgtgcagcagggcgcccgtgacgccgcacagcgcgacgagctggttgcccgaggatttgcccagcgcggcgacgccgagtccgatgaggatgacgccgacgttttcgatcgaggagtaggccagcaggcgtttcacgtcgttctgcatggctgcgaggatcacgccccacaggcccgtgacgacgcccgccgcgagcaggatcactccggcggtgtgcaggagaggctgttcgcccagcgcggccgtcacgcgcaggatgccgtagacgcccgtcttgatcatcacgcccgacatcagggccgagacgtgcgacggggctgcggggtgcgcctccggaagccagacgtgcatcgggaaaagtcccgccttcatgccgaagcccgccaggaacaccagcagcagcggcagtcccggctgcgtgcggaagtagtcgcccagcgcgccgaacgtggcggcgccgcaggccgcgtcgagccgtacgaagccgatgacgagcagcacgaagccgatgtgcatcataatcaggtaggagagcgccgcgcgccggacttcgcgccgctgggcgtcgaagaggatcagcaggaacgacgccacggtcatcagttcccagaaaaagaggaacgagaagccgccgtccgaaaggaccacgcccagcatggcgtagaacatcgccaccagcgccgtgtagtgcagcgagatgtgggccggggatttctcggcaaggcagtgggccagatagccccgcgagtagagcacggcggcgacggcgccgaccgagatgatcacgacgaacagcgccgaaagcccgtccatcgagccggtgtcgccgccgaaaagcgtaccggggaccgaccacacggggccgctgtccgctccggccagcacgccgacggcgcgcgccgagcaccacagggcgccggcggccgtgagggccagcgcagtccagaccttgcgccgcagcggcgtggcgaaaatggccgccgccaccgccgtcagggcgattagcaggtagagaaaaagcatatttcagaaatttatcgtattcttaaccgttgaccaccgatgccatgaccaccgccgcgagggccgcggtctcggtgcgcagacgctgtcgtccgagggtgatctcttcgaaaccgttggccagcgcgaaggcgatttcgccgggcgagaagtcgccttcgggaccgatgaagaccgtggccgtctcgcccggacggagcgcgcgggccaggtaggccttcccggcgggcgactgcgccggggcgcagtgggcgatgaacttccgcccctcgggggccgacagcaccgcttcgcggaagggggtgagcggatgcagcacggggcggtaggccttgagcgactgtttcagcgccgcggtgacgaccttctcgccccgctcgggcttgaagacccggcgttcgctgtgttccgtttccagcggcacgacggccgtgacgcccacctcggtggctttttccaaaaaccactcgaaacgctccgaattcttggtcggcgcgacggccatcgtcagcgcgtaaggcagtttttcgaatccggtttcggcgctgacgacccgcacggtgcagcgccggggattgtcgtcggtgatttcgcagcaaaataaattgccccgtccgtcagttatatggatgcgcccgccgcactggagccgcagtacgcggatgcagtgtttcgactcctcctcgttcagcgtatgaagcggggggacgatgtccggcgcgtagaaaagttgcatgattggagacctattatttattctatttacagatttttccctaactttgtcgaataatgcgcgacaaagttactaaaataacacgatcgatgaaacgtatcaccgctttattaacactttttctggctatgacattcatatcctgcaagtccgggaaaaccgtgggcgaaaatccttttttcgccgaatgggagaccccatacggcgtgccgcccttcgacaagatcgaaccggagcacttcctgcctgcgatcgaacgcggcatgtcgctgcacgaggccgagatcgacgccatcacgtcgaacaacgacgcgccgacgttcgagaacgtcatcctcgcctacgacgcttcgggaaagatgctttcgcaggtcgagctgatcttcgggatgctctgcgccgcggagaacacctccgaaatgcaggcgctggaggagcagattatgccccggatggcggcgcacgccgacaagatccgtctcaacgggaaacttttcgaacggatcaaagccgtctacgaccgtcgcgccgcgctgggactcgacgccgagcagagccgtctgctggagaagacctaccgcagtttcgtgcgcgccggagcgctgctcgacgccgagcggaaggcgcgtctgaaggcgatcaacgaggagctgtcgctcacggccgtgaagttcgggcagaacctcctcgccgagaacaacaactatgcgctggaactcgcctcgtccgatctggacggcattccggccacggcccgcgatctggcccgcgaaaaggccgaggcgatgggccggaagggcaaatacgtctttacgctgcacaagcccagcctgatcccgtttctgacctactcgtcgaaacgcgaactgcgcgagcagatctacaaggcctacctcaaccgctgcaacaacggcgacgagtatgacaacaaacagctgatcaacgatttcatccgcttgcgcacggagaaggcccacctgctgggctatccctcgtatgccgcctacgtcgtggacgacgagatggccggaacgaccgacgccgtgtacggcctgctggaggagatctggaccccggcgctcgaaagcgccaagggcgagctggccgagatggaggagctgttccggaaggatttccccgagggagagttcgcgtcgtgggactggtggtattacgccgagaaggtccgcaagcagaaatatgccctcgacgaggagatgctgcggccctatttctcgctggagaacgtgcagggaggcatcttcttcctcgccaaccggctctacggcatcacgttccgcccgatcgtcgtgccgctgtaccaccccgaggcggtcgcttacgaggtgctcgacgtcgaccagtcgcatctgggcgtgctctatttcgattacttcccgcgcgacggaaagagccagggcgcgtggtgcggcaactacgtggagcagacctacgaggacgggaagcgcgtggcgcccgtggtgtcggtcgtctgcaacttcacgcgcccggcggggggcaatcccgcgctgctgaccctcgacgagaccgagacgctgttccacgagttcgggcatgcgctccacttcctgttccacgacgtgaagtaccgcggactcgcggaggtcgagggcgatttcgtggagctgccctcgcagctgatggagaactgggcgttcgatcccgaggtgctcaagcagtatgccgtgcattaccgttcgaacgaggtgattccgaaatacctcgtcgacaaactgcgccgcagcgaacttttcaaccagggtttcatggccaccgagctgatcgccgcgtcgctttcggacatggacatccactcgatcaccgaatacgagccgttcgacccgatggccttcgagcgcaaggccctgaccgaaaaacgcgggctgatcccgcagatcgagccgcgctaccgttacccctatttctcgcacatcttcgacggcggctactctgcgggctactatttctatacgtgggccgaggtgctcgacaaggacgccttcgaggccttccgcgagagcggcgacctctttaacaagaagatcgccggcgatttccgccgcaagatcctcgcccgcggcggctcggaggacggcatgaccatgtaccgcgacttccgcggcaaggaccccgacaagcgggcgatgcttcgcggccgggggcttctgaatgaacccgaaccgtccggcgaggacgccgctcccgccgccgaaacggcatccgccgcccgggaaaactgaaactcgaacccatcggaaaagaaaccgctaatttgatatgataatgaaaaaagtactgtttattatggccgtttccgctatggcggcaggctgcgccgacaattcgatccccaaagcgcagctgcccgaactcgatctgtcgaatcccctgctggccgcatgggatacgccccatgagaccccgccgttctccgagataaaactcgcggactacgaaccggcgttcgatgccgcgatcgcctgctcgcgcgccgagatcgacgcgatcgtgaacaaccccaagaaacccacctttggcaatacgatcgtggcgctggagcgtcagggcgagctgctcaatcgcatcgcggggcttttcttcaacctgctcgaagccgacacgtcggacgaaatgcagcagatcgcacagcgcgtgcagcccaagctgaccgaactgtcgaacgacatctcgctcaatcccgagctgttcgcccgggtgaaacaggtttacgagcatccgggacgtcttcgcaaagaggacaggaaactgctcgaggacacctatcagagtttcgctcgcagcggcgcggccctttccgacgccgacaaggagctttaccgcaagtacacctccgaactctcggggctgacgctccggttcgggcagaacgcgctggccgcgaccaacgcattcacgctcaacatcaccgatccgaaggtggtggccgagctgcccgcattcgtccgcgaaggcatggccgccgaggccaaggcccgcggcgagaagggctggaccgtgacgctgcaacatcccagctacctgccgtttatgacctattcctcgaaccgcgaactgaaggagaaactctggaaagccagcaattcgagggcgctgggcggcgagttcgacaacacggagatcgtgaagaaaatcgccaatacgcgtctgaagatcgccaacctgctgggctacaagtgctatgccgattacgtgctcgaacgccgcatggccgagaatacgaaaacggtcaacgacttcctcgcggaactgctggccgcgaccaagtcctatgccgacgccgactaccgcacggtgagcgactacgccgctacgctcggtttcaagggacagctgatgccctgggactggtcctattacaccgagaaatacaaggatgagaaatatgccctgaacgacgagctggtgaaaccctacctgaaactcgaaaacgtgaagaagggcgtcttcatgctggccaacaagctctacgggctgaatttcacgcccgacgacaagatcgaggtgtaccatcccgacgtgacggcctacgacgtgacggacgccgacggacgcttcatggcggtcctctacctcgacttcttcccccgcgagtcgaagcgttcgggggcgtggatgaccgagttccgcggcacgaagatcgaggacggcaaggagatccgtccgctggtgtcgctggtgatgaacttcaccaagccctccgaaacggctccgtcgctgctgacgttcgacgagctggagaccttcctccacgaattcggacacgccctgcacggcatgctgggcgagggcaagtacgagtcgcagaccggcacgaacgtctaccgcgacttcgtggaactgccctcgcagctgatggagaactgggcgaccgagaaggagttcctcgacctgtgggccgtgcactacgagaccggcgagccgatgcccgccgagatcgtcgaccgcatcgtcgccgcgcagaactatctggcggcttacgccaacgtgcgccagctgtcgttcggcatgaccgacatggcatggcatacgctcaccgagccgttcgagggcgacgtggagcagttcgaagccgtctcgatggccccgacgcaggtgctgcccgtcgtttccggaacggcgatggctccggccttcggccacatcttctcgggcggttacgccgccggatactacggttacaagtgggccgaggtgctcgaggccgacgctttctcgctcttcaaggagaagggcatcttcaaccgcgaggcggcttcgtcgttccgcgagaacgtcctctcgaagggcggcacggagcacccgatggaactctacgtgcgtttccgcggccacaagcccgaaacccgcgccctcatcgaaaagatgggtctgggaaaataagcgatccgttcaccgattccggaggagggcctgcacaggccctcctcttttcgtatcccggggaccggaacggcaggctgcggttccgggtcgggcattcggatcttcggcgccgcgggcgccgacgcgtctgtccgcccccccccgccgggcgcgattcagttttgcaaccgtccggttttttcgtatctttgcgacttgggaagagaattttttgttgactatatctatgcttgaaaaatcgaatgccgcattgatcgaggcgatccatgcgcatacgccgcagcattcgaatccggcttcgctgctgatggacatgctgaacataggccgcgaggccgcttacaggaggctgcgcggcgaggtgccgttcaccttcggcgaagccagcgcgctgtgcgcgcggatgcacttctcgctcgaccgggtggtggggctggcggctacggacaagttgtcattccagctcaagttcaaggagttcaccgcgctgctcgaaacctataacgagattctggaacgcgacatcgcctttatgcgcgaggtggcgtcagaccccacgaccgaatttgccacggcgaccaattcgctgccggcggagttctacggcaaatacgacaacctgaaccggttcaagctcttcaaatggctttaccagcacgaagtgggcaaccccgccgtgaggaccttcgaggagctgaagctccccgcggaattgcagcgcaactgccgggagtatgtccggtgggtgcagtcggtcgcgacgacctacctgatcttcgacgacagcaatttcaagcactggctcaacgccctgcgcgcctaccgggagatgcacctgatttcgcaggagagcgttcgcgtgctccgggacgaactcttcgccatgctcgacgagatggagacggtggcggtcaagggggagttcgagaacggcaacaggatcttcctctatctttcggacatcgacctcgagtcgtcgtacagctatgtcacgaccagcagacaccaggccgtgaacatcggaatgttctcgctgaacggactgcggacgcccgatccgctgatgtacgaatacgtgaagaaatggatcaagacccagagccggttttcgacgctcatatccggcagcggagagctgcggcgcatccactatttcaagcgtcagcgcgagatcgtcgcccagctgggctgacgccccgttcccgatgcggagtctctccggcgggcacaaaaagaaaggggagggtttcacaaccctcccctcgaagcctccggatgtgcggaacatagttgcgtcactgtcaagcaatccttccaacttctgtgggcgtcactacatgcaaactgaattcttcatagcccctttcggaactgatacaaacgtacgccatttcggcggacgaaccaagacggaaatcgaaacaatccgaaatgcgatgttctaatttcgtgtatcgaacggattatcgccgctccggtttcgataatcggttattccgggaggcggcgtttcgattatcgaaacgaaaggcctccggcgtctggaatccgaaacgccgcttccgcccgccgcagaaatgaaaaaacgactaaattttgcacgggccgcgacgaagtagtaaaaaattactacttttaccccgtccccgttcataccggctatttcccatggaagacgaaagaacactgctcgaaaaacttgcccgcggcgaccgcgcgtcgttcgacgccctctacatgaggtatgcggcgaagaccgaggagtttctgtgccgcatgctcaagaaccgggcagaggccgaggacatcacccacgacctgttcctgaaaatctggcagaaccgcagcacgatggccggcgtcacggccttcggctcctacctgttccgcatggcccgcaatgccgtatacgaccgtttcgacagccgcgcggtgcggaccaacttcgcccggcagaccaatctgctgcccgaatacgaacttccggacgtggacaaccgcgacctgctgctgctgattcagctggcggtggagaagatgcccgggcagcggcagcgcatcttccgcatgagccgtgaggagggcatcgccaacgacgaaatcgcccggcgtcttggcatctccacgcgcaccgtcgaaaatcagatttcgagggccttgtccgaactgcgcaaactcgtcacgctgatcctgtttttcttctaaaaacttttttcacctttcgggcgtgcgtaacggccgcgtgaaccgtcttattggtgaaacgggaaagatcgttatgtctgtaaatcgaataaaaaccattatcgaaaccttcctcggcagcgacatgcccggggaggtgcagcagcgcttcgcggagtggctgcgcgaccccgcctcgcgcgatgaaaaggagcgggcgctggaaaactactggaacggactccgggccgaagagccgggaggccgtgaacgcaaactcgaacggctccacgaggcgatgcgccgcggcgagcggttccgcgtccgccgcatctggcgcaacgtcgcagccgcggccgccgtcgtgctgctggccgccggaacgaactacgtcgtggtgaaggattacctgcgcacgaagatcgaaaccaacatcgtcacctcggcccacgacaagggcgagtacgtactgcccgacggtacgcatatctggctcaacgccgggagcgtgctccggtactacggcgacctgacggggcgccgcagggtggtggaactcgacggcgaaggcttcttcaaggtccggcacgatgccgaccgtccgttcatcctgcagatggaggatatgaacatcgaggtgctcggcacggagttcgacgtgatcaactacgccgagttcgcgaccacggaggccattctctgcaacggcagcatccgcgcctacggcggccgtctgccggcgcccgtgacgctgaaacccggcgacaggctggtgttcgacaggaaggaggggcgcgcctcgcgctcgcgggtctcgacgcgcaactactcgcagtggatgggcggctcgttgtcgttcgacgacacctcgctggccgacattctcaccaacctcgaacgctggtacgccgtcgagatcgacgctcccgaggcgtggacccggcaggtgcgcatgtcgttcaagctgatccgcaacgaaagtatcgaggagattctgaaagccatgtcgctcgtcgtggagatggactacgtctgcgcagggcggcgcataacgatcattcccaaacaaccgaaaaattcctaaaaattacgcgcctatgtaaaaaggacccggactttcccgctttcacttccggaacgcagaatccgttccggccgtttcgaccattacctaaattacaaacccatgcgtaaacttatccaagctaaaatccttggtgcagccctgctattgctttttctgaccacgggaggacgggcgcaaactccccccccccacggttagcattgccaaggaaaacgtctctgtcgaacaggttttgaaagagatagagcgactgaccaattacacgtttttctacaataacggcgacttcgacctcaagcggatcgtgtccgtcgcggccgtgcgcaagcccgtgtccgaggtggtgcggcagatgctgcccgactgttcgtgccgtttcgagaaccggaggatcatcctcgtcaaggacgccgcgccccagcgccagacggtgaagggcgtcgtcaaggacgagaagggcgcgcccgtgatcggcgccacggtcctcgtgaccgatgccgggcagacccggggcatatcgaccgacatgaacggcagcttcacgctcaccctcccggcgcttacggccgaagccatgctcgaagtgtcgttcatcggcttcgacacctacaaatcggcggtcggaagccgcacgttcttcgacgtggtgctgacctacgcccagcagagcatcgacgaggtggtcgtggtgggatacggcgtgcagaagaaggccaacctcacgggagccgtggccaccgtgtcgcagaaggagctgaaagaccgtcccgtgtcgaacgtgggccgcgccttgcagggcgtgatccccaacctcaacgtgacgctctcgtcgggacagcccggagccggagcgacctacaacatccgcggtacgacctcgcccaacggcggcagccccctggtgctgatcgacggcgtcgagacctatcccgaccgcatcaactcgaacgacatcgagtcgatcacggtcctgaaggacgcttcgtccgccgccatctacggcgcacgcggagccttcggcgtcatcctgatcaccaccaagagcggcaagtacaacgagaaggccgaagtgtcgtacaacggctatttctccgtctccagccccacgacctcgaccgactacgagacgcgcggatactactcggccaagatcgccgacttctttatgatggccacgcagaacaccccctacacctcctacaccgaggccgactacaaggctctctgggagcggcgcaacgacaagaccgagaacccggcgcgtccgtgggtcgtcaccgacaggcgcaacggccgtcagcagtacgtctatctggccaacttcgactggtacaactacctctacgacgacagccgcccgacgtgggaccacaacatcaacatcaagggcggaaccaaggcgctctcctacatggtcagcggacgctattaccagcagaagggcgtcaaccgcatcgagccggacatgtttaagtcctacaacttccgcgtgaagctccaggccgagatcaaaccctggctgaccatcgccagcaacaccaagttcttccagtcgaactacaagtattacggttacgaggacgagtataacaacttccgcaaacccacgctgcacgccctggcgtcgttcgtgccggtgaatcccgacggtacggccgtgtcgcacacctcgatgacccagtcgtcgacccactacctgatggacggttacagcgccatgatgcagaagggcaagagcttcggcaacaagaagacgcaggagatcaccacgacgttcgaagccacgttcaaactgcacaaaaacttcaacgtaaaggccgacttcagctatacgcagggatacctccacaacgactaccgcagcgtcaatgtccagtattcgcagtatccgggcgaggtgatgaccgaacccgaaggaagcttccccaacaagtacaaggaggtcgtctgggaccagaactactatgtggccgacgtctacggaacctacaacaagaccttcagcgagaagcacaacctgacgctgatcgccggttacaactacgaggccaagtattaccgcgacctcacggcggccaacgacggactgctgtccgaggacctctcggacttcaacctcgccaagggcacgaccaacttcacgctcaacggaggccgcaacgaatacgccatcatgggctggttctaccgcgcggcttacgattacaagggcaagtacctggccgaagtcaacggacgctacgacggtacgtcgcgtttcccgcgcggcaagcgttacggcttcttcccctcgttctcggcggcataccgcatcagcgaggaggcgttcttcgaaccgctgcgcaagacggtcgacaacctcaagatccgactttcgtacggttcgctcggcaaccagcagatcggttactacgacttcatccagaccatcacgaccaagggctcgatgggcgactattcgttcgacggtacgattctcggccagcacgccacggtgagcgatcccgtatcgggcaaccagacctgggagaaggtcatctcgaagaacctcggcgcggatctcaacatgttcagcaaccgtctctcgctgacggccgatttctacatccgcgacacgaagggcatcctgggcaagggcaagtcgctgccctcgatctacggcgccaacgaaccgcaggtcaactcgaacaacctccgtacgaaaggttacgaactggtgctgggctggcgcgactcgttcaaactcgccggaagcaccttcagctacggcatcacggggacgttctcggactacacggccgagtacaccaagtgcgacaacccctcggggctgatcggagacccttatgtgggcaagaagtacggcgaaatctggggctataaggtcgacgggctgttccgcaacgacgaggaggccgccgagtacgcttcgcgcgtggacctttcgaaggtcgccgcaggatattattccgcgacgggagcctatggaaagggcgttcgcggaggcgacatcaagtacctcgacctggacggaagcggtatcgtcgacggcggcaagggaacgctggaagacccgggagaccgccgcgtgatcggcaactcgtcgccccgctaccaatacggactcacgctcaacctttcgtggtacggattcgacctctcggtgttcatgcagggcatcggccggctcgactggtatcccggcgcggacaacctgcgcttctgggggccgtacagccgtccctatgcgaccttcattccgaaaaattttatgagtcaggtgtggagcgagagcaatcccgacgcctatctcccgcgcgcccgcgcctatacgtcgctcaactcgacgcagggcacggcctactataccaacgaccgttacctgcaaaatctggcctactgccggctgaaaaacctcaccctcggctacacgattcccaagcggctgacctcgaaggtcggcatcaaggagtgccgtgtctacttcagcggcgagaacctcgccacgtggagcgccctgaaaaacgatttcctcgatcccgagcaggctgccgccgattcggacaagaagtcgaacgtctatccctggtgcaggacctattccgtgggtctgaacttaaccttctaaagcgattgccgttatgaaaaaatacattctttatatactgaccggtgtggcggcgtgcggactttgcagctgcgaggacgcgctcgaccgctacccgaaggaccggctcactcccgataacttcttccacacggaggaggagtgccagctctacaccaacgatttctacacgatgtttccctccgccgggaccatctacggcgagacggccgacatcatcgccaagaccacgctcacgagcgaggtgctgggcaaccgcaccgtgcccgcgacggctagctcctggaagtgggagaagctgcgcgacatcaatttcttcctccaatactcctccaactgtgccgacgagcacgtgcggctcgagtacgagggcgtggcgcgcttcttccgggcgtggttctacttcgagaaggtgaagcattacggcgacgtgccctgggtcgaccgtccgatcgacgccggcgacccgctgctcttcgaaaagggccgcgatccgcgcgagatggtgatgcagaaggtgatcgaagacctcgatttcgccgttaccaacctgcccgtcgaaaggtcggtctaccgcgtgacgcgctgggcggcgctggcgctcaagagccgcgtctgcctgttcgagggaaccttccgcaagtatcacgggctgaaggactgggaaagctatctcacggcctgcgcgacggcgtcgaagcgcttcatcgacgagagcggatactcggtctacacgacgggaacgacgccgtatctcaaccttttctcgtcgctcaaggccctcgacaccgaaatcgtgctcgcccgggcctacaacacggctatcggtctgaagcacgacgtcaacggctacctcacgagcatcacgatgggacgccccggcctgctgaagaacatcgccaacatgtatctgatgaaggacggcacacccttcacctcgcagcccggctgggagacgatgcagctccccgaggagagcaaaaaccgggacggccgcttcgcacagacggtccgcacgcccgggtacaagcgcatcgacgacacggcgctgtcggccccgaaccttgcggcgacgatgaccggataccagctggtgaagtacctccagtcggccaagtacgattcgtacaacgcttcgacgaacgacctgccgctgctgcgcgccgccgaggtgatgctcaactacgccgaggccaaggccgagctgggaaccctcacgcaggaagacatcgaccttgcgatcaagccgctgcgcgaccgtgcgggcgtcgccaacctctcgctcacgaaggccaacgcttcgcccgacccctatctggcttcgccggagaccggctatgccaacgtgacgggcgacaacaagggcgtgatcctcgaaatccgccgcgaacgcaccgtcgaactgctgatggagaacctccgctactgggacatcatgcgctggaaggagggcaagcgtttcgaaaaacccttcacggggctgtatttccccggcacggggtcctacgacctgaacaacgacggcgtggacgacgtctgcatctggtccggctcgaagcccgcgacctcggccccggcggtctacgaactgaacaaggagatcttcttgagcgggggcgacagcggctacatcattatccatacggattacgcccgttcgtggaacgaggagcgcgattacctctatcccgtgcccaccgacgaccgggtgctgacccagggcgccattacgcagaaccccggctggaacgacggcctgaatttctaacctgaaaaaaagaatgattatgaaaatcaagcgattcatactgctcgccttctccggctgctgcctggcgttgtccggggcggcctgctccgggctggagggcgacaactccgacttcgatttcggggacatgacctccgacgcacccgacaatccctacgacggacagggttacgaccgcctgcccaactcggtgcggctggcgacctacaacacccaccgctgcgagggatggacccagaactccgggaccgaccgcgcgaactacaacaacacggccaaggtcatctcgctgatggaccccgacgtgatcgcgttgcaggaactggacaagaacaccacgtggcatcagaccgaccagttgcaggaactggccgaccgcacggggatgcggccctactactgcaagacgatcagctaccgcggcggcgactacggcatcggcatcctctgcaagacggcgcctaaaaacacctatgcgggcgatctgccgggaaccgaggcgcggaagttcttcctcgcggagttcgacggctacatcttcatcgccacgcacttctgccaccagagcgatgagaaccgccagcggtcgttcgagatcataaccgagtatatcgccgccaactacgccgcctataccaagccgatctacctggcgggggacctcaacacgtcgaagcttccggcagcggcgctcgaatcgtggaagatcatcagcacctcggccaataccttcgtgaacacctcttcgccgtcgcgcatcgactatgtgctcgtctacacgggcaattcgccgtcgtacgaggtgctgcgcaccgccgtgccctcgtacgaggagatcaacgtgatgacggtctccgaccaccttcccgtactggtagacctcaaaaagtaagcgattatgaaaaacagactcttgaatagctttttccgggcggcggcggccttcgcgctgctgctcgcggccggagcgtgcaaggacgacgtggcgctgccgatgcagcgggtagcgctgaacacgcacgcgattctcgcgccgtcgttcgccacgacgctctcgttcgacgtcgaggccaactgcgactggacgatctccgtcgcgggcgacgacacctcgtgggccgaactctcgcagaccgaggccacgggcatggcgaccgtggcggtgtccattgccgaaaacaatacttccggctcccgtgcgctgacgatacgcgttgcggccaaacggaatgccgcggtcgtggaggagttgtccttcgtgcaggcttcggcgacggccgaggggtatctctcgatccccgatctgcggaaactggccgccgacggcgactactccgtgacgcaggacgtgaagatgcgcggaatcgtggtgtcgagcgtccaggacaataactattacgacaactgcatcgcgctccagagcgccctgaaagccaactgcggcattacgctccgcaccgacgaggtgctctaccgcaagccgggcgaggagctggagatcgacctgaagggggcggtcgtcggggtgaatcccgaaaccggcgtgatggaggtgaaacccgccgcggacgacaaggtgagccgcacggagacgacgcaggtgaagatcgaagccttgaagatcacctacgaggagcttcggtcgggagcctacgagtcgatgtatgcaggcatttattcccaggtctacgtgccggaaggcggttcgctgaacggtataacgctcaaggacgatctgtcgatgcaggaccccgacaacaaccgtttccggctggtggcttcgcaggcttcctcgtttggcattgatcctgcgccgacgggtagcggagtgctcaagggaatcgttgtgccgcaggacggcgcctatgcgatccgcccctgcacggccggggacaaggaactcaccgggctgcgcttcggcgcccaggttggaatcaggctgccctatgtcttctcgttctacgccgcctcgcaggccaacaaggattgcaagtacgtgacggtgaccgatggcacgttcgacaaattgggggcagacttcaaggtcgaggacaaggatgtcaccaaatgcgtcgtgctgacggcaaaggtggccccgacgtcgaacagcagccatttccggctgacgcactgggccgatgaggccgcgcatgacaacattccggccaagtcgatggtttacggtcaggactcctatttcctgctgaccgtgcctttggccgaggatatgcctgcatcgttccgcatctcattcggtatgtcgggaacgggcggcgctccgaagaactgggcggtggcctattcgaccgacggcacggagtacgtcactccctccgacggctcgacagccatctcgattcccggggcgattgcgagcagcggctatttctattattttacggtgaccctgacgccgcagttgcggctgatgaagggccagacgctgctactgaaactttatccgacagacaacgtcagttgcaacggcggtacggctggatacaattcggattcgcgcctgcattcgtgcgtcgcgattgaggccgtgccgaaattcagtacaccgaaaccggtcggagcggtttatttcgagcctttcgacgggttgaccgaagggttggactacctctacggcgataagttggctgccatgctgaactattgcggcagcgacatctcggaatgggacgccgtgctgaaaaacggactttcgggcaccaacgttcatcagcgtccgggttatgcccagatcggttatgtcgagtcgcaggccgtgaagcgggcagagtatgagaataaggcgggggcactgctcacgccggcgctgaacgcaacgggcgatctgaacctctctttccgcgcgatggcctacaagacctgttcggatcgccccaagggtaaggcgaccgaacccaaggacaagaagggcgatctgacggagatcgtcgtcgaggtgatcggcggcggaacgatcgacggcgcgacgaagaaggtcgtgtcgggactggcgaccgatgcgttcaacacctattcgctgacgatcgacggcgcgacggcctccacggccctgcgctttacgagcgaacccgcttcgggcgagttctcgcgctggttcatcgacgatatctgtgtgacgaagtagggattgcccgatgattgaaaagcgtcccggagcattcgctccgggacgcttcgttacaggccggattgcgtccggtcagttctccgccttggtggtgacggtgaagagctggcggccgtattcgtcggtggcggttatccggatctcggcggacggcgttacgggcgtgtattcgagcatgtggtcggtgcggtatttgtcgaggaagctgaacgaggagatgtcgttgccgcaggcgtcgtggaccgtgacgtaatagtcgtcgtactcccggaccgccttcagctgcgaggcgggaaccgcggctccgttttcgcggcattcgaatttccacgtcggatgccagtcccagacgttgaggcgcacgaccggcctgccttcggcgtttttcagccccgagttgtagacccggcagtattgctcgtcgctgtcgctgaaattcacgctccgccgctccgtgatcgttccgccgctgaaatcgtaacgggtgaatgtcgccggggcgccgtcgtggcagagcgggaaataccaccatgcgccgcatacgcacgggtgcgtgtactcggtcacgctcatgtcgctgcgcggtacggtgaccgtttcggcgatgtggttgtgccccgaccagatcgtgacaggcagctgcttgtccttgtagatgtcgagcaattcgtcggcgttgtccatcgggttgggcgacgaggcccccgggttgcggcggaaggccgggcaatgccacgcgattacgatgcgctcgacgtccgacggcatgtagtcggcgtccttctgcgcccagtccatctgacgccggttgaggcggacggcgaatgaccggtcgccgccggtgttgacatactgcgtattgtcgaacacgacgtagtgcaccttgccgatgttgacggcgtagtatgtcggcccgagcgcggagatataggccagttcggccgccgagtcgtcgtcgccggcgatgttctgcacggccatgtcgtggtcgtggttgccgatggcgtggaaggtctggatcggcatgcccccgcgttcgcagacgttgacgaaattggccagcgtcgccttgttggcgttggtccagtgcgactcctgcgtcatgtcgcccagattcatgccgtagaccggcacgcctgcgggcagggctttgacgtagtcgcgcagcgtcttgaggtaggtgcggcggaacgtcgtggagtccagttcgcccttcgggggacagatcgacggcgtggccgacgatgtggtcttgatcatcgcccggttgcggatatgcatgtcggccgacacgatcataatgtggcggtcgttgttcacctttttcagcgtgaagtcgtgccgctgcacctgctccacgctcgtgggagcggtgaccctgcggtagaagcgggggatgaacccacgcgtggattcgacctcgtaacccgacgggacggtcaggtagaccagtttcgacttgtcggacgacgtgcgcagcccgtaggccccctgtttgttcgtgcgcgtcatgttcacgccgtcggtcacgacgacgccctgcacggcggcgccggcgcacgtcacgaccccgcgcacggtggctttcgggtcgatcttcgaccagtcgacgccgtcgtcgggcgaagggggcggatcgacgggtttttcctgttctccgggatcgtcgcccgaacccgaacagcatatgccgccggcggatattgcgagcagggcggccaataaaagcaacagttttttcatggttgcggtttttgcggtttgcggcatgggacggctttcgggaaaagcggggaaaggacggtcgtcctctccccgcttcgaccgttcgttacacgccgctatttgttatagcggatggcgaaatattcgaggctgctggcgtgttccgcggccagggcagcgccgctggcgctctggttcaggcgcgcgttggcgtagtcggagccgtcgctgcagaggtcgctcgtcgggcgaagccggatgtagacgttttcgtggccgagaatctcctggggaagctcgaagtcgatgcttttgtaggctacgcacgacgaatagagcgtgttcgcccagacggaaacgtcggggatggtgtattcgccgatcagattccactgcgagtcgtcctttgcggcctgcgaatcggtcagcgaccattcggcacaccagaaacggggcgagaagaagctctgctgcgtgttcataacggaaatctgcatcgagatatgcgatgtcgtgatgccttcggtcgagaagttgatcagccaggcgtaggggcggtcggtgtcgtcgtcccaccagaagtggttggcgaaggcggtgtagcaggaaccgtatacattccccttgccgcgcatacccgtgctgccgttgtagttgatttgcgtggaattcgtcgcaatctcattgttgcccggccagccacccgtgccgtttgccgcgtttttatccttggcatagggaccgcaccactccagcgttccgtcgggattgcggctcaccagatcgtccatcagcggattccagctctccttcgcggggtcgatcactacgccgatgccgttcttgttgccgaagttggctccgaagatataggaggcattgttgccgacgggacccaggtattcgtaggttccgccgccccacatgtgctgctggaaggtggcctgcaggtactctttgctggcggagccggtgtacttctcctgataggtgtgcgtcaggtagccgttcgttccgtaggtgggtttctggaccttgttctctttgtcgggattccagtagcggtactccgtcagcagggccgagaaactgtcttcgacgctgttctgcatgttgtcccagatgtcgcccttggtctggtggcggatctggtagcggccgatgaagccgagcgtcggatcgtcgtccatttcggccgggtcggctccgtcgcgccattcgaaacgcgagaaacgctcgtggacgatgacgcccgaaatcttgcccgagccgtagggcaggcgcgtgccgtcgctgcggtaggcgcagttggtgttggtcagcatgtacatgtcatcgccgttgatgtcgcgcacgagcagcgggtatttgctgatgcggcttgcgcccgtgccgatcgcatagccctcgttgatgggcgtgattgcgcctttgcgtacggggaactcgacgtccttcagggtgacgtaggtgtagatgtcgtcgtcggtgagctggctcatccacttctccttcacgggaacgtccgatgccgaacccgcgatgcgcgaaatgaccatcgccttggtgacgttgcgcagttcatagcggtcgggggtctcgaccaggtagcccgaggcgccctgaatgagaatctgcacgtggtcgtactgttcgaagacgttgtcttcggccgtggcggtctggacggcgatgccgtatttgccgtcgtaggtttcgaggtagacggtccgctccgatatgctgtagtcgatctttgcggtcgtgctttgcgtgttctcgcccgcattgtggctcttggtgttgctcaccacgatgccttcgaggatgacgtagtcttcgaccttcttgttcatggcatacgtttggcggaactcctcgaatgtgatctgacgtccgagggtctccttcgccgtgcgctgcaggaggttgaattcgacggagacggtctcctcccagccgtcggtgaaggagagcgacacggtagccgaacgcgggatttcatctgcggcgttcgcctcggtcgtgatggccagactgcgattttcgctctcggaatccacgatttcgagactctcgatccaatcggcgttgtcggccttggcatactcgatgtcgaccgtgatctccgagaagggaatgttggtctcgatcggcgagatgttctcgccgccggctccggcgacgatgacggacgagttggcgaactcgatcttggcgtccacgagcgccttctgcttgacgtagaccgtgtcgcggcgcgcgtccacgtcggagcagagcacgaagcccgctttgcgtttgaagccttcgttgaattcgcattcggcggtgatggcgccctttccgtcctccgtctcaccgcaggtcaggctgatccagtcggcctggttgatacgctcgatatggaaggcgctgttggcgtagatgtcgatgtcgaacgtattcgcatcggcttcgacgacgaactccttcttcagcgcgcccagtttgaccagggccagatcgtcggcgtcgtcgacgctgcaggccgccgaggctgcgcatacggccgcaatgcctaaaaatttaaatatcgatttacgacagttcatattctatacgttttattcgttgttgtttgttccggccgtgcgcggcggacggtgcatccgccgcgcgaccgcaattcgtttagttgtagcgtaccgttatcgttccgatacgggcctggctgttaccggccgcaacggacggcgtcagcgttcccttctcgatgcccagcgccgtcaggtagttcgaagacgtggctttggggtcgatgtcggtaaccttgtcggccacctgcaagcgcagaaccactttctcccggccgaagcagtcggcgggcagtttgcgcaggtgctcggtgaagcccggggtcgaatcctgcgacgtggtcgaccaccacgtgatcgaacgcttcttgatgatcgggctgtcgggaacggcctggaacgtcgctccgccgtcgaccgaatagagcaggttccagtgcgccgggccggagagggtcgtgttgctcatcgagccgtggccccagacgatgccgaagaccatgttcgaaccgctgattccctgcgtggagaacgaaatgtcgaagtatttgcccttgtcggcgtcgaaatcccaccattgctgggtgaacgtgatgccgccgtttgccaccagacctttctgttcggaggaggcgcctcccttgcccgagcagacgacgttgttgaagtccgctgcggcaccctgcgtggcgccgtatttattgatctcgccttcgccgatctccggtatgaggtcggtcttgcggtcgttccagttccactcgacgacggttttcgagaacggttcgtcggtcagcgcgatctcctcggcggtcatggcgcgcaactggtagcggcccaggtcgccgaagcggatcggggcgacgtcgtcagccacgacgatgccgcggaacgtgcccgaaccctgcggtacgacggagttgaaatccaggtcgcggcccgagctgaaacgccgccagggagcggccgtattggtcagcatgtagatggtccggcccgtgttgtcgtagcacatcagcggggccacgtcccagcgcggggcggtagccgtgccgatcgggttgatgttgtccttgaacgaatagccgtcggtgcagttggtgtaggcgccgtccttgcacatgatttcgaggttggtgaccgacaccagcgtgaagatgtcgtcgtcggtgagttcgccgatcgtcttcgtcttgaccggaatcttgaactcgtcgggcgtcgaggtttcgaggatgttggccgcagtaagtcccgtgatggtgtagcactcgggggagttcttcttttcgagcgtggccccgttcagggagaggcgcaccttcgagaagcgggccggcgtgttgtcttcggaggaggcgaatttcaggcagaagccccacttgccgtcgaggctctcgatataggccgtccggtcgttttcgccgcggtcgaagaagaactgttgggtctggggactcgaaacgacgttcttgctgtcggggtcgctgacgatgtagccttcgatatactgctggagcgtgatctcgcccggagtcagggcgcgcaccgcggcgaaatcggcagcggtcgggtagggcttctgggtgattttgcacgaggccgaaacggagttgccgtgttcgtcggtgaagttgagccggatcgtggcggtgcgcggctccgaaccctcgtttttggccagcgagaacgtcaggccgtcgtcggtgatcgcgggcttcagaatccactcggcgccctccgcgacgggaacgtcgtacgccacgtcgtaaccgatctggtcggagtagggcacgaggttgttggtcgtggccggaaccgcgcaatcctgggcgtaaccttcgtacgtttcggcattgctgtccagcttgagcgccggcagggcgatgccctgcgtgacggtgagcaccgatttggtgatctcgcccttggcgtcttcgatgaagagggtcagatcggcgatgcgcgcgaatccggagtcgttgtccgtgacctcgaacgtgattcccttgtaggtggccgagacgttggagatccacggttcgacgggctgcgcctgcggttcgtcgccgccttcgccttcgccgccctcttcgccctcttcggcgcgggtcaggacggtgacgggatcgttgggcaggccgtcgttgtcgtaataggtgacgctggcttccagatcgtcgatgcagtagcgcaggttggtgctgatcggcgtgaagatctgcgaccgggacttcagcagcgtaaccgccggtttcgagaacgagagcgaagcgtcggtgatggctccggcctgcgagaacatcaccgtatcggtcagggaacctttctcgaacacgacgccgatctttctcgaaatgccgtagttggccgaataggtgaatacgatttcgttattgccgtatccctggagtttgttgagggaggcccacttcacgggacgcgtgaagcgcgccgtccagtcgccgttcgagtagaccagcacgtgcgtcgaaccggcatccttggtcagggaaagttcgcgcgccgagaccgccagaggcaggtccagctcgaaatcctcctggcagccggtcagggccgtcgtcagggccgtcagggcgatcagtacgccggcgaccgatcttttctgtttattgaatattgttttcattcgtctgaaagtttcggattattacaagccgtaagccttgtattcgttgttgtcgaggttgttcttcgagtaggtgacctccgtgtcgggaatggggtagtagcggtggcacggtttgatccggctgttagccgtgttgagttgcagataggcgtagtcgctgttgtccgttacggcttcgtaccagataccccagcggaccaggtcgtacttgcgctggaattcgccgaaaagctcgcgggcgcgctcgttgcggatctcctcctcgaggcgcgcgggggtgcggaaggtgtacttggacagattggcgcgcgtgcgggtcatgtcgaggtattcgaccgccttttcgtagttttccttatagaaatagcactcggccatcatcagcagcgcgtcggcatagcggaagaccttgtagttgttgccgtcggccgaggactgcatgttcggacaccagaacttcggtccgcaccacgggcgggtgttggtgctgttgaacgtcttgtcctcgtatccccatgccatgttgtacttggcgcggatgtccttgcccattttggactggagaccctggctgaaatagacgttcggacgcatcgccgaccagacggtcgcctggtcgcccagttcgggaatctccacgccgtcgtagatcgccgaattggccgcacgcgggtagggctggcagatgcaggccacgttggacgtgtaggtaagggcgccctgggtgtaggtgtgctgaatttccatgatcgactccggggtgttcttgttccggaacaggatattctcggcgtagtcgtactgcgacagcggaccgtaaatcgtttcgatctgctccagcgcgtccagcgccacgtcccactgcttgttccacatggccatcttggcgatgagcatgtaggcgcaggaggctcccagacgattggcctcgttgtcgtaggtgcgggtttgggcggcgaggggagctatcgactgaaggtcttcgatgaccttgttgcgggtctcgttggcgtccatgcgcggcagcacctgaatccggctcaaaacctcgttgtccgtaacgtcgtcgaaatagaacggaacgttgccgaagaagcaggtcagcgtccagtagaagaacgcccgcagggttttcgcttcgcaaagcagctggtggtactgctcctcgctgatcacctcgtttttataggcgcgctcgatgccgttgacggcgaagttgcagcgctgtacgccgaggtagccgttgcgccagaccgtcgaacccatgcgcggcacggcgggcgagatgtccaggctggcgtcgagcgttcccgacgggcagtaggcgatgtcggtgacacactcggtggcgatcatgtaggtataggtgtagatcgacttgatcggaatgtagcatccgtttacgaccgactggcattccgaaaatttgcggaagaagtcgtcgggattcgagatgcccgatgtgtcttcgtccagcgtgcatgcctgaaacgaaagcatggccatggccgcggccgtgtagaatatatgtttgagtttcatcgtcttaattctgttaggttagtatctcaactgaaggctgaatatgatggtgcggggcttgggataggcgcccaggtccatacggcgcagcgtcgacgaggttccctcgctggaaacgtcggggtcgaatccgttgtactttttccacagaaagaggttttcgcccgatacgctcagggtgaggtctttcatccacgagcattttttcttgaggtcgaacgtgtacgacagcgtgatgttcttcagccggaggtacgaagcgtcgtggatcataaagtcgctcggaagcgcggcgtcgcttttcgctccggcccgcggaatgtcggaattcgggttccggacgggatgccaggcgttcagcatgtagcggtactggttagcgaactgcgaaccggccatgtagatctccgaatagttgtagatcttgccgccgagcgagtaggcgaagtagacgcccagcttgaaaccgtggatgtagaacgtgttctgcaaacctccgtacagatacgggtcggcgttgccctggtagatcaggtcttcgcgcgagagcacgccgtcgtggttggtgtcgtagtagcgcgggcctccgtcggtgttggccgggctgacgtaggttttcgtcaccgcgttttcctcgcgttcctcggcgctcttccacgtgccgccgtatttgaatccccagagcgagttgagcgggtagcccttgacgtagccgtacatcatgtaggggttgttgcccggcgagttgtaggccgaaatgaagtcctcggaaccgatgtcgtcgaccttctgttcgttgtgcgacagggtgagcgtcgtcgaccagtggaacttcgggcggacgatgttgtggctctcgaccgacagctcgatacccttgttcgaggtcgagccgatgttggtccagcgtgacgtgtaaccggtttgggccgcaacggccagcgacatcagcaggtcggtcgttttggatttgtaggcttcggccgtgatgttcaggcggcctttgaacatcgaccagtcgatcgccacgttgtaggccgtggtcttctcccacgtgaggtccggggagtccaggcggctgcggtagaacgccacgggctgcgatccgtcgaacagatagccgcccgtcgtcgaggagagggtggcgagcgaacggtaggtgctgatcgcgtcgttacccgtcagaccggcgctcaggcgcagcgacaggtcgtcgatccagttgcagtccttcaggaaattctcgttcgaaatgttccacttgagggcggccgacgggaagaacgcccacttgttgttggccgcgaagttcgaggctccgtcgtaacgtcccgtcacggtcaggtaatagcgcgacttccagttgtagttcagacgcgcgtagaccgatgttttggttttcttcgagtaggaagtgcccgccgaataggtctctttgtcctgcacggcgttcatgttgttccacaggatggcgtcgtccatgtagcctttgccgctcaggttgaaatcgtgcgaggcgaaactgtaagccgagaaaccgccgagaacgtcgaacgaatggccgttcttctcgaacttgtagccggccgtggtctcccacgagaacgagtgctcgtcccactcggcgcggtaggcctcgccgccttcgttctcgcctttcaggggaagggttcccggatagtaacggtaggtatgccgctggtagagatagtaggagaaggtgctgttgatcgtgaagttcttcaccggctccagtttcagcgtgaaggcgtggttgttcgagtggcgttcgaggtaataggtgttcaggtcgatcagcgcacgctgcgtgttgatcttctgcccgttgtaatacagcgggttatacgtgtcgttcggcttgagcagcggtgacagatactgggcgctgctgtaccaggccgttccgccgatggaggatttgttctggtcgttgtgacgccaggtgtacgaacccgtatagccgactttcatccatttgaacaactggcgttcgaggttgatacgtcccgtgaaacgctgctggccgctgtcctggatgataccttcggtgtcgttgtaggagaacgaagcgtaatacgacgatttgtcgctggttcccgacagcgagagggcgtagttggaatagagggccgtgcgggtgatctcgttgatccagttcgtcccttcgcccagcgagagcgggtcggaatagaccgaaccggagaggggcgtgtccttgcctacgtcggggtggttggcgtcgctgccgaaataggcgtagtcgttgcggtactgcgcgaattccgacgcgttcataatgtcgagctgacggggcagttgggagaagcccatgtcggtcttgaaggtgatgttgaccttgcccttggagccgagaccccgcttggtggtgatgaggatgacgccgtttgcgccgcgcgaaccgtagatcgccgtcgaggaggcgtccttgaggacggatatgcctgcgatgtcgtcggagttgatgtcgttcaggtcgtggatggcgtccatcacgccgtcgacgacgatcagcggctcgttcgacgcgttgatcgagcgcgtgccgcggatgcggatggtggtcgtggcgcccggctcaccggtggtcgacatgaagtcggctccggcgatacgtccctgaagggcgttgtcgaccgaaagaaccggtacgtccttgatgtcgttcatcttgaccgtcgcgaccgaaccggtcaggtcctttttggcgacctggccgtaaccgatgaccacgatttcgtcgatgtcggtggaggagtccttctccatcctgacggtgaagttcgtccgcgaacccacgttcagggtctcggtcttgtaacccaggtacgaaatctggaggctgtccgaaggcttggccttgatggtgaatttgcctttgacatcggtgactgcgccctgcgtgcctttgacgaccacgaccgtggcgccgatcagcgggttgccgtccgggtcgaggacggttccgctgacagtctgggccttttgttgagccgttgccggcgccgtgtgcgccgcgagcagtatcagtaccgccaccagcgacatcactcggacggatgctcttattgagtgaagaattttattcattttaggcttttttttgttgaaacgacttgttcctcttttttactcttgttcctcctcgtcgaaaggcgctcccaggatgatgtccttaccgctgccgttgttttcggcaaagtagtcctcttcgaccttctgcagacggcggatgtagaaattgtcgaggtaaatgcggttgttgacggcggagttctgcgtgagggagccgcagatgatgcggacccgcgtgttggccgtaatcgggttggctttcgtgccggcgacgaagacgaggaaatcgtgaccctcccacatgtcttcggggaactcctcgctcgaaatgtcgtaatagccggcttcgaggtcgatcgtggtcttttcggattgggcgaaatcacggatgacgcccccgccgagcacctcgaccgtgatcttgttgtcgtcccgggcgccggtcatgtaatcggtgaaggccacggcgcggaacgaaaccatcagcagcgagtcgctgcggagcgtgttggtgtagggcgaaatcaggtcggctccgtggcccttgtcgtcgcccagtttcaggtagccgttcttgccgtagcagtgggcgacctcctccccttcgatcgtcgtggacgtgaacccgaggtttttctgggccgtggtccagttgtcgatcggggtttcgccgtcggtgaagcgcgggtcggtcttgccgtacttcagggtcgcgaaatcattgctcacgcgggccgtggagccttggtggatggggattatccggttgtagttcagttcgccgtcggaggctgccagaatcagcatgcccgtgcgccgcgtgtagtagctcgacgtcgtgctgcgccggttggccttcagggttatcacgcgaagccccgtctggggatctgtcgaagagtaatccaccaccttggcccacggcgtcgctgcgtcgtcttcccacgtcgcgacaaagtcgatattggcgtccacgtagagtttggcgagaccgcctttcacgccgacgatgccggcgtcgataggctcttttgcgatcgggtccgcgtagaccttgatcgattcgttacgatcggagttcgaatgcgtttcacacgacgtgatgccgattgtcgccgcgattaatgcggctccggccaatccgcgtgaaaaacggacgaaacccttcgtcaggaatgtttttctcataattggtaaaaaggttaagattgggttttatttattggggtcggttgatcgacgggaggtctactgtttcagctcgaagtccgccaggatcgggcgatggtccgacgggtcgtagaagttggacacgtaggggctttgggtcgccgtggtccacttgtccatgacggtcagtgcgttcactatgcgggcgtacatcgagggcgacgcatacatgtagtcgatacgggcgttgccgtaagtcgacgatatgaagcttcccgggtagcgctcggcgatgatgtccttgaggtcggtatggtccagaatgtggttgtggaccagcagccgggtgtcgttctcgggatagccgtagtaccagttgtcggcgcgcgaccgcgagttgaagtcgcccatcatcagccaatcctgacaggaagcgtacgcgggattgttgacggtctgcgcgcagatgtacttgatctcgaattcgcggtacttgtcgccctccttgttggcggcgctcgccgcctgatcggccgagccgactccgaatccataggcctgcggccacgtgtggagcgtcacgatgtttatcgtccggcccttcacggtaacccgctgaatggcggcgccgtgggacacgggcttgcccgcctggtccgaatcggttattttcagcagcgtctcgatcggatatttcgacgtgatggtctgcggatagttgtcgcgccagccgccgacggccgtgtaggcgtggccgtaacgggccgccagtgccgcccagccgtcgggcaggaaccgggcggaggaggcttgcgccgaattcgtattgtccttgtagatggtggccgattcgcaccatacgcagatgtcgggatcgtatttcttcacccacgcgacgaagttgttgtaattgttcgcctggtcggaccacatgccgttctggatgttccagtagagcacgcgcaggttgtcggagccgcggcccatctcgccgagcgcgcggacctcgatattgtccacgtagaagccgtgcacgccgctgctcacgtcgttgccggcccagtagagcatcgtgccgtcggtcgcgttgtttacgacgacctccacgttgtgccacttcttgacggccgcttcgctcgacgggagcgttacgtggctcttttcgacgatgtatctccccgaggcgctcgtgtagcccgaattgtcggccgtcagggcgatgctcttgccgtcgacggaggccgacgcgatcatgccgccgttcaccacctggaacagcaggagatccgtcgatccgtactggtagcagaaatcgaacgaaaccttcacggaacgtatgccgtcgatggatttcagggctgcggtctggaaaatgccccgccccgtgttacctgtgccgcaagccagatagccctggtattcctggcagcggaacatataggtatagtcggcgatattgcggctcgcgacgtacgaatcggacatcaggtgggacgtgccgaccgttttgccgctgatctcgtcccacgtgttcgactggatgaacgccgagccggggttgttgtaggcgaccttctcgaaggagtccgcatagccgtcgcgtccggttcccgtaccgggggtgacggcttcggccgtcggagcgtatcccgtcgactcctggccgcccatgatgttgccgccccagacgaaattgtcgaaactctcgtaaaacaccaggtcggagtcgggggcgtatttcagcgttacggacgtggccttccccgccgtcagctgcgcagtcgtcagcgtgtgctccatggcgcggtgctccgaatcggaaatggtgattttcaggcccgacggatagtcgcccggagccagcatcacgtagaaatgtttcggcgtgccgctctccagcgagacgcatttgccgttgtcggtgcagttcagcacggcgaaaccgacaccgccggtgattgagaggtagccgcgcgagggcaggaaattcgcatagcctgccagggggctttctgcgaggttctcgaccttcaccgaggcgattttggccgacccggtcagggccaggtccagcacggcgaaggcgtcgtcgaacaccagcttgttgccgttctccttggtgtaggagccgtacatgggatacgattgcagcgatgccgccgtggcggcccagaactgcgagtagggcagtttcacgtcggcataggccgaagagccgtaccagccggaggagcctgaattggtcaggatggcgttgtaggtcccggagctcgaagcgctcgcctcgacgtagtagcggccgttttcatcgctttcgacggcataggattttccgttgaccgagacgagcgatttgctccatgcccgttcgccggttcccatggccttgcggacggaattttccgcctcgcggagatagaaacggactttgccgttcactacctgtatgtcctcgtattcatcgccgccgcccggattgtcgggtccgtcgggatcgtcgacatgtttgtctccgctgctgcacgccatgcagagacaccccgccagcaacagcgccggcttcaggatgaagttcagggattctcgtagatttagggtcatagtttcgtgttttatggttgggtgaaaagttgtcggctgccggtcggacacaatgaaaaacgcgtgcatattgccatatacggcaatatgcacgcgtcaatcgcgggcggtgacggtttacttaactccgggtattcggcgcggcgaggggggggggaaatttacaagtcccctgcggcgcgagcaggctcgtgccgtaaccggacggtggtgatcgaacaatcggcggtaaagtaaattcacggctctaattttgatcgtttttttatcggaaatgagtttcgaaaagattcatttccgaaagcaaatgtaaccaaaatattgttatcgggcaaataggatgcataaaaaataatcgttttttaacatttttgctgcttttcgtgtttcgatttggggagagggccgttcggcgtggcttttcgtttgaaaggaatgtccggaggggaaccgcggattctgcggcccgttcggaacggggagaagcgcgccggcaagagacggaaaagccccgcattcggggaatgcagggcttcgttgagctaccaggattcgaacctggaataacaggaccagaatctgttgtgttaccgttacaccatagctcaatagattttggtgatgcaaaagtagaactttattttgcaaatgcaaagaaaaatccggaaaaaatttcatacatttgtttcaatctacgcagaaaaaaccgcttgaaacttaaaatttacacaaaatcagaaaattatgggaattaaatttcggcttatcgccatgaacttccttcagtatgcgatctggggttcgtggcttatctcgctgggcgcctacctgggaggcggactcgacttctcgggattgcagatcggcagcttcttcgcgacgatgggaatcgcctcgctgttcatgcccgccgtgatggggattatcgccgatcgctggattccggcgcagaaactgctgggcatctgccatttcatcagcggcgcgtttctcatcgccgcggcctcgcagacggcttacgccccgctgtacagctgcatgctgctgagcgtgatgttctacatgccgaccatcgccctgtcgaactccgtggcctacaatgccctcgatctggcccggctcgataccgtgaagcatttcccgcccatccgcgtatggggaaccgtgggattcatcgccgccatgtggttcgttgacctgacgcacatcgggggcgtgcagatcaagctcaccgagtggcagctctacgtttcggccctgctgtcgttcgtactggcggcctactcgttctcgctgccggggtgtcccgtcgagcgcagcgcgcagaagcagtcgtgggtcgatacgctgggcttgcgggccttcgcgctcttcaaggagaagcggatggccattttcttcgtcttctcgatgctgctgggcgccgctttgcagatcaccaacgccttcggcgacagctacattcagaatttcggctcgatgccccagtatgccgattcggccatcgtgaagcactcggtgatcctgctctcgctgtcgcagatgtccgaaacgctctgcattctgctgattcctttcttcctccggcgtttcggcattaagaaagtgatgctgatttcgatgctggcctgggtgctgcgcttcgggttcttcggcatcggcgatccgggatcgggtgcggcgttcctcgtgctttcgatgatcgtctacggcgtggcgttcgacttcttcaacatctccggctcgctcttcgtcgaaaaggagaccagccgcgagatccgctcctcggcgcagggcgtctttatgattatgaccaacggtttcggcgccttcttcggctcgtatgccgcgggcgccgtcgtggacgcatacgggtggcccgattcttggttcatcttcgcagggtacgcgctcgtggtggccgtggttttcgccgtggttttcaaatacaggcacaaccctgccgaaatggggggcgtgaaacattgatgactgacggtccggcggcggggagaaccttgccgccggatttttttatccgcgcaggagcattttgacgtggggagcgcccgcttcggggtattcgctggcggacagtgcgccggaagggcggatgatgaccggatgcatggcgggcgttctattttatagaggtgccgttacgacattaaagatacgaaaattatggatacgatcggtgtgaatgatgcgagctgcatccgctgcggccgctgcgtgaaggtgtgcccttcgcagattttcgtgcaggaaaaagccgggggcgacgtgacgctgcataaacccgaaaactgcatcctttgcggacattgcgtggccgcctgccccacgggggcggtgaaccatgcggagtttccggccgagcgggtgcatgcggtggattacggcgcgatgcccacgcccgagcaggtggaactgctgctggccgtgcggcggtcgaaccgcgcactttcggcgcgccccgtgtcgcaggagctgctggaccgcatcgttgcggcggcggaccgcgccccgacggcgagcaatgcccgccagctggggtatacgctggtgaccgacgcggcgcagctgcgcgctgtcacggaatatacgctcgggattttcggcacactcgaaaagcggctgctgcatccgctcgtgcggccgtggctgagccgcctcgtgccgggcgtttatcgctatgtgccggtgttcaaacgcctgcggcgcgaatatgccgagggccgcgaccgcgtgctgcggggcgcgacggcggtgctgttcatccatgcgcccagggaaagccggttcggtgcggaggacgggaacctggcgtatgaaaacgcttcgctgatggccgaggcgctgggcgtgagccagatatacatggggttcgtgctgacggccgtccggcaggacaggaaggcgaagctggccgcgatgctgggactgggcgaccgccgcatctgcgcggtgatggccctcgggatgccgcagttccgctatcccaattacatcgaccgcgcgccggcgccggtgacgcggaaatagctgtttcggcgttttgccgttacagatggaaagtcctgtatgtataagcgggtatgcgtcaatacatattgtcgtacatcgactgcgatttgtcgtatttcaggtcggagagcgatgcggccttgacgccgatgttgaaactccacgaacggtggtagccgaacggaatccacgaaaaggacatctgccagcagtggaggtcgcgcgtgatcgagaccgacgaggtggtcagtttgttggccttgatgtcgtagccgccctggaaggtgatgcccgtcttgggggtgacgttcagcgaaccgttgaagccgatggtttgggtgacgttcttccggtagcccgtcgtgccgttgttggtgtacgagatcgagtagttgaccgcgtagttgaatccgaagttccacggcagcgagaagtcgtagtagctttgcgccatgtactgtcttcgcagcacggggtccatctgcccgtaagggtcgtagaacgggttctggtactccggaggtatcgacgtgatgtcgttgatggccgtttcgctccggtcgttgcgcgatttgaacgtatagccgaacgaccagcccgtcgagacgacgcggcccgggaagaagagcttgttgtaacgcttgccctcgggcgagacgcggtaggggtcgagcgtcagcgagaggttgatgccgaaattgttgaacagcgtcgtacggaacgagaccgggatgttcgaaagtcccatcgagtcggccaggaagttgtacgaaccgctgatgcgcagttcgtcgatcagcttgatcttcttcacgcccgaggtgtcgcgtttcgagaggaccttcatttcgaggttctgcgacagcgagaagttcatcgacatcgaacggcccgacgaggggacgccgtaggcgttgacggcatagggcgaataggtcgtgaagcggcccgtggagtcggtctggcgggtcttgtaatagccgtatttggggtcgctgaagtccggggcgtaggagaagccgatcgagggggtcagcgtgtggcggatcgcctggatcttgcggtcgcggctcttcttcgtgaagtcgtacatgccgtagaccgtcgtggaggccgaaacgctgaagttgtagttgtagaggcggtagaaaccgtagttcgtcggcagcgtgtcggtctggttggtgacggggttccactcgaactcgaccttcttgaaataccacttctcgttgtagttgaccgacggcgagaggttgatgtagtttaacaggttgaacgacgccgaaatcggaatcgagtgctcgatgccgtttttcatgttttcaagcgtctccttggagaagacctccgattcggtggtggtcaccgagttggtcatcttacccgtgtactgcatcgagatcttctcgtaccagcggtccttgccctgcttctccttgcgtttgaaggggtagaagcgcgagacgttgaagaccatcgtggggagcgtgatggagatggtcttgttctgcgagttctgcgagatggccatgttcgccgacagcgagaagggcgttccggcccagttcttcgagtaggagaccgtcgagttggtctgcgtcgagaggatgtcgttgaggttcgtggctgaatagcggctgtaaccgctcgtggcgaagttcaccgaggccgagaaggtcgaacccgggttggccttggggtcctgcgagtgggtccactggatgcggaagttgctctgcttgatgtagtcgtcctcgcccttttcgcccgtcttgacattcgaatactgcatgttgaaactgccgctgtacttgtagcgcttgatgtagcgcgaggcggccgaagcctcccacgatcccagcgtgtagaatccgccgcgcaccgccaggtcggcgtattcgcccagggtgaagtaatagcccaggtcgcgcaggaagaaacctttggagtactcctcgccgtaggtgggcatcagcaggcccgacttggggcccatgttgatcgggaagaagccctcggggatgccgaggaagtagatcggcacgtcctccatcaccaggtaggccgggccggtgatcaccttcttgccgggtatgaccttcgccttggtcatcgccaggtagaagtgggggtggtccgtatggtcgcaggtggtgtacttgccgtgctcgatgttgatcgtgttgtcgggcatcttcttcacgctgccgcccaccagccagccgtcgccctgctgcgtggccacgcccttgattttcgccttcttcgagtcgaggttgtaggtgatcgtgtccatctggtaggtggccgacccttcggtgaattcgggtttggtgacaatatccttgccgtcgagcgtgtcgggcttgccgtaggcgtagaccatcttcgaatccatgtcgatgcgcatgtagtcggccttgaggttgctgttctggtaggtgacgtcgcccttgttgtagatgtagaccagcttgttgcgcacgtcgtagaccagcgagtcggtgttcttgcccgtgatcgggtcgtcgaggaacgcccctgcgggccgcggcgtcttcaccgaatcgcggcggagcgtgtcggcggcgagcgagtcgggccgtgccgcgcccggagaatcggccttctgcgccacgagcgagtcgacctgcgccgaaaagagcgaatccttctcctcctgcggcagtgcgttgaacgcttcgcgccgccgggcctcttcgcgcgcctgcctgcgggcctcgcgccgcgagggggtgacaaaaggcggacgtgcgctcgtgtcgggacgtatcgcgtcggcgcgggacggaaccgggacggtgtccccgggggcgggattgcgggccgtgcggggcgctccgccgcccagtacgatctgggcaaacagcagaatcaccgtcgccgacaagagatattttaccctaattttatccaaaatcccaaaaattttccatacctttgccgacaagtcggcaaaaacgcccggatcgaggtcctgtgcccttcccgccgcgttttcggcccgacaaagataggtaaaaatttatagaaagctcacacttggtaccattaaatatgcgcacacgacttttgctgctattcgccttcgcggctgcaactgttcttatgaacgttgcgtctgcggggaatattgcgcacggcgtcgaagtcgtggtcatcgacgccgggcacgggggaaaattccccggcgcgcactacggcggggtctatgaaaaggacctcacgctgaaggtggcgctcaaactcggaaagctcgtcgaggaggggatgccgggcgtgaaggtggtctacacccgcacggcggacaggactctgggggcggacctggcggccgacctgcaggcgcgggccgacattgccaacaaggccgggggcgacctcttcatctcgatccacgccaacgccgcaccccgggcgacgggcgtgcggggcgtcgagacgctgatcatgggcgagagttcgaaggagcagcgctacaacgagaacgccctgttcgaaaacaaccgcgaggatctgatcgacatgtccgacgaacggacggcggccatcgtgcgggcttacattcagaatctccagttcacctacggcgaatacagcatggctttcgcccgctgcattcagaacagctacctcaaggcgggccgccattcgcgcggcataaagccgcagctgctgcgggtgctctatgcgacggacatgccgggcgtgctgaccgagatcgggttcatgtccaaccagcaggaactggcctacatgaagtccgataaggggcagaacgagatcgcccggtcgctctaccaggcgatccgcaactattcggtctatgtgctcgggacccggatggccgaggaggagcaggccgctgccgcgaaaccggccgcggaacagcctgcggaaaagtctgccggaaaggccgcggaaaagagcgttgaaaagcctgcggcaaagtccgctgaaaagaccgcagcggcgcagcccgcggagggaaagaccgcgacggccgctccggtcagaaccccggagaaaccggccgtacagcccctgcgctatacgattcaggtgatggcttcggcgtcgcccgtacccctcgcctcggcgcagttccgtgcctaccgcggcaaggtgaaggagtatgcggccgaggggcggttcccctataaatacggtgtgggcgagtacggcacccgtgaagccgcacagcggaagctggccgaggtgcgcaaggtatttcccggggccttcgtggtcgcgtgccggggtacgcaaattgtaaaataaaagtacagatatgaaaagggaagttaaaatcggaattttcggcgtgacgatgatcattgccgcgtgggccggaatccggtttttgaaaggattcgacattttcagccgcaattcggtctattacgccgcctacgaccagatcaacggcgtgcaggcggcgtcgccgattatgatgaaaggcgtcaagatcggtacggtgacgggcatttcgttcgatccgcagcgcagcgacaacgtcgtgttgcagttcaccatcaaacgtcagtatcacattccgaccgactccgaggccaagatttacagcaacgggctgatgggcggaaaggccatcgaaatcaactacggcacggcgcgcacctatctccagaagggcgacacgctgcgttcggtgcgcgaacgcgacctgatggacgtggccgggtcggagctggatttcttcaagcagaaggtgtcgcaggtgacgggcgacctctcgcgcacgctgaccaatctcaatcgcctgatggaggccaacgcgcagaatatttccgggacgttgagccacctgaacgccattacgggcgacatggccggcctgctcgacgccgagaagcgcaacctgaaagccgccgtcgacgaccttacggagttctccgcgatgctgggcaggaataccccgcgtgtggacagcatcgtcggcagcctgaaccggataaccggggagctggccgacgccgggttcgcccgcaggcttacggacgctgtggacgaggtgaacggtctgctggcaaaggtcgaggcgggcgaggggaccgtcggcaaactgatgaacgatcctgcgctctacgattcgctgaccgaggccagcgctaatctcgcctcgctgctggccaacctcgagcagtatcccggccgctacgtgcatttctcgcttttcgggcgcagtcccgagaagatgcaggagaaggccgagcgcaaagccgccaaagctgcggccagggccgagcgggactcggtgaaattaagaattaaaaattaagaattaaaaattggaaaggagccggcaggaatgtttttcatcatgtcccgtccggccatattgccatatcgagagcgcaaaatgaatcttcggacggtcggccaattcttaatttttcatttttaatttttcattcctcatgatttaccctgctacattcgagcaaaagataggtttcgaccggctccgcgagcaggtcgcggcacgttgcaccatgcgcgccgcccgcgagcggctcgtcgcggagggcttttcgacctctgcgcgcgagatcgaacggcggctggcgctcgccgacgaaatgcgcctgctgctggatatggagcatgatttccccgggggcgagtaccccgacgtcgattacatcgtcgccaaactgcgcgtcgaaggttcgttcctcgacgtggaggaggtcgtgaccctgcgccgggcgctggccgcaatcggcggcatcgtctcgttcatcatcagccgcgaggagcgttatccggccctccatgcccgcacgcggggcgttgcggcctttccggagatcgtgcagcgcatcgacggcattctcgaccgcttcggccaggtgaaggacaacgcctcgcccgccctgcaggagatccgccgctccatccgcgaacgcgaagggcaggcggccaagcggttgcaggccgtgctgtctgcggccaagggggcgggcatcgtcgatgccgacgcccagatctcgatccgcgacggcaaggccgtgatcccggtttcggcgggcaacaaacgcaaactgaacggctttatccacgacgaatcggcgacgggcaaaaccttctacgtcgaaccggtcgaggtggtagagatcaacaacgaactgcgcgaactggagtacgccgagcggcgcgaggtggtgcgcatcctcacggagtttaccgaagcgatccgtcccgacgcggggctgatcgccgattcgggcgactacctggccgagatcgacatgctgcgcgccaagggccgctgggcctcggagaacgggtgcgtgcggccgatcctctcgacggacgacaggctggtgctgaaaaacgcccgccacccgctgttgcagcagacgctgcgggctgcggggcgcgagatcgtgccgctggatttgcagctcgaccgtcgcaagcgcatcctcgtcatctcgggacccaacgccggcggcaagtcggtctgcctgaaaaccacgggcatcgtgcagtacatgttccagtgcgggtttccggttccggtctccgaggtctcggaactgccggtcttcgagagcattttcatcgacatcggcgacgagcagtcgatcgacaacgacctgtcgacctattcgtcgcacctgctgaacatgaagcacatgctggcgggcgcttcgggccgcacgctggtgctgatcgacgagttcgggtcgggaaccgagcctgtcatcggcggggccatcgccgaggcgatcctcgagcgtctgctcggcagggggtgttacggcgtgatcacgacccactacgccaatatcaagtattacgccgcgtcggtggagggcatcgccaacggcgcgatgatgttcgacgtgcagaacatccggccgctgttccggctggaaatgggcaagccgggcagttcgttcgccgtggagatcgcccgcaagatcgggcttccggaggatattatccgtgcggcgagcgagaaggccgggtcggatcacatcaatatcgagaaacagctgcgcgagatcgcccgcgacaagcattactgggagcagaagcgcgatcgcatccgtctgacggaccgcaaggtcgaggagttggagcagaactatgccgagcagctggcgaagatccgcgccgagcggcaggagattctgaaaaaggccaagcaggaggcccggcagttgatcgccgacgccaacaaacagatagaaaatacgattaaaaccatccgcgaggcgcaggccgagaaggagctgacgcggctggcgcggcgcgagctggacgacttccgcgaggcggtcgagaaggccgacgaggccgggaacgaagccgccgtggcccgcgagatcgagcgtatcgaacgccgccgccgacggcgcgccgagcgcagggcgcagcagggcgcgcagccggcagccggggaggccgctccgcagcccgaaaagccgcgcgaagtggtcgccgggtcgaaagtccgcatggccgggcaggagatggtcggcgtggtgcagtcggtgaagggaaagcgggcgcaggtggcgttcggacagatactcacgacggtggacaaagggctgctgacggtggtttcgaacaacgaataccgcgaggcgacgcggcccgttgcggcccgtacggtgctctcggtggacatctcgtcgcgcaaactcaacttcaaggatcacatcgacgtgcgcggcatgcgggccgccgatgcgctggacgaggtgcgcaacttcatcgacgacgcgctgatggtgggcgtgggtacggtgtcgattctccacggcaagggcacgggggctttgaaggaggagattcgccgctacctgcgcacggtgccggagatcgtctcggcggtcgacgaacatgccgaccggggcggtgcgggaattacgatcgtgaccttcgatctgtcgtgattttgcagtctgcgactgctgctgttctttgtaccttttgaccgcaaaaggtacccaaagttctccgcatgtcgctttacgcgggattgtcctcctgtccgcgctgaacgggcgcagcaagatcaagcctttacggcgcaaaaacacgcgccgtttagactgtggcggctcggtaaacagcacgctgtctgccctcgcctgcggacgcctttgccagcctcccgctccgggcgcgcggaccatcggacgatctctttccgctccaagcgatcatgcggcggtttaaaaccgcttttaggggcgagggtaggttattgcgattccgattccgtcctgcgcaagtactcataaaacaggcgtcttacgcctgctccgccgtttgcggcgagtgattccgactcgatgccggagccgttgtaggcgtaggcatccgtcggagagtttttgggaacctttttgcggaaaaaaggtacaaagatccggcgactatgtcgcggcttgagtctttttgacgaccagaaagcggcaaagagctgtaaatattttcgtacttttggaaatgaaagtacaaaagataaaccattgggtattttatgaaatatcgtctttcgcaaatcgccgccgtcgtgggcggcaggttctccggaacggactgcgaagtgcagtcggtggtgaccgacagccgctcgctgacgtgcgagcttggctcgggaccggtgttcgtcgccatgtgcggcgcgaaccacgattcgcatgcgttcgtggcgcagatgtatgcgcgcggcgtgcgggcttttatggtcgaacggcctctcgaagccctgccggagtgcggttacgtggttgttgaaaacgccattgcggccttgcagtgtctggcggcctatcaccgggcgcagttccggggaacggtggtgggcatcaccggttcgaacggcaagacggtcatcaaggagtggattgccgaggaactgcccgcggggatgaagtgctaccgttcgcccaagagctacaattcgcagctgggcgtgccgctgtcggtgctgatgatcgagggcgacgagcagctggcgctgatcgaggcggggatttcgaaacccggggagatggcgcggctggagcgcatcatccgtcccgacgtggtggttttcacctcgatcggcgacgcgcaccaggagaatttcctcaacctggagcagaaatgcgacgaaaagatggttctggcccaccgtgccgagaccatcgtttaccacagttattacgagccgctgggccgcatgatcgcctcgcgcttcgcggggcggaagctctgcgacgcggcctcatgccccgaggtcccggagacgctgatcggcaacgaggcgtcacgccgcaacgcccggatcgtcgaggcgttctgcgcggcgatgggctatcccgcgccgtcgtttaccgaagctcccgaggtcgccatgcgtctcgaagtcaaggacggcatcaacgactcggtgctgatcaacgacgcctacaacctcgatctcaactcgctggccctggcgctcgactacctgcacaacgtggcgctgtcgcgccgccggacgctcgtgctgtcggacatcgcgcagagcgggctgaccgacgacgaactttacggccgcgtggcgggaatggtcgcgcgggcaggcatagacacgctcgtcggcatcggtcccaaactgaagcgttacgccgcgctgttcggctgcgacagggagttttacgcctcgaccgacgagtgcatctcccgcatcggccgcagggccgtggccgggcgtgccgtcttgttgaaaggcgcgcgggagtaccgtttcgagaaactcgcgcatgcgctggcgcgcaagagccacacgacggtgctggaggtcgatctcgacgccatgatccacaacctaaactatttccgctcgaagctcgactttcggacccggctcgtggcgatggtcaaggcgggttcgtacggcgcgggggatttcgaggtggcgcagatgctccagcatcagggcgtcgactacctcgccgtggcgttcgccgacgagggcgtgctgctgcgcgagcgggggatcacgatgcccgtcgtggtgctgaatgccgacgccgacagtttcgaccagatgatcgccaaccgcctcgaacccgagatatacagtttccgttcgctcgccgatttcgccgatgcggtgtcgcatgcgggcgaaacccgctatccggttcacatcaagctcgatacgggcatgcaccggctgggattcatggagggggagatcgggcggttgtgcgaggtgctgccgacattgcccgccgtgaaggtggcgtcggtcttttcgcacctgaactgcgccgacatgcccgaagaggatgcctacacccgggagcagatcgcgtgctacgaccgcatgagcgccgccgtagccgcgtcgctgccctattccgtcatccgccatacggccaattcggcggccatcgagcggttccccgaggcgcggttcgacatgtgccgcctcgggctggggctttacggcttcggctgggagcacaatgcgggcctgcgcccggtttcggcgctcaaaacccgcatcgtgcagatcaagcgtctcgaagcgggcgacgccgtgggctacgggcgcgccgggaaattgctgcggccgaccgtgacggcgaccgtgccgatcggttacgccgacgggctggaccgccatctgggctgcggacgctggtcgatgcgtgtggccgggcggcctgcgccgatcgtgggccgcgtctgcatggacagctgcatgatcgacatcacggacattccgggcgtcggcgagggcgacgaagtgacggtcttctccgccgagccgggcaacgacctcgaaacgatggcccgggtgctcgacacgataccctacgagattatgacgtcggtctcgtcgcgtgtgaaacgaatctacctcaaggaataaggcgcggagcgcaattcataattcagaattcacaattcagaattatgcctgcgaacctaattaattatgcattatgaatgaattctgaatttggaattttatacctgattccctgtccgatttcggacgaaacggcgccgtgggacgtgctgcctgcggccaaccgggccgtgatggatgcgctggactactttatcgttgagaacacccgcacggcgcggcgtttcctgtcgaaagccggcatcgcgcggcccatcggcgaactggaattccgcgaactgaacgagcacaccgcggccggccgcgaaatcgaggagctgatcgcgccgctgctcgaaggccgctcggcaggggtgatctccgaggcgggagtgccgggcgtggcggatcccggggcgccggtcgtcggggcgtgccaccgccgcggcatccgcgtcgtgccgctcgtcggcccgtcgtcgatcattttggcggtgatggcctcgggactcaacggacagtcgttcgctttcaacggctacctgcctgtgaagccgcccgaacggacccgggccatccgtttcttcgaacgccgtgcgctgtcggaggggcagtcgcagcttttcatcgaagctccgtaccgcaacgtgaagctgatggagcagttggtgcagacgctcggagaccagacgcgcctgaccgtcgccgtggacctcacggctccggacgagcggatcgagacccatacggccggggagtggcgccgccgccagctgcccgaaatgaacaggcgcccggccattttcatcatcggataagcgccgccttgccgcgaagcggctttgggacggtggcgcgcaggccggttcgatgcccggcatgcaggcattgcccttgaagaccgcctcttggccgggttggtatgcaatttgttcgaataaggggaggaaaactgaaaaattacaagatatgaaaaaagaaaaagtttataatgaggctgttagcggcgacgaagggttcacccccggcgatggttatccgtcgtgcgacggggagccttgtgccaatgtgtcagatgaaaccgacgaggcgactgacacattggcagacggtgaacccgctgccgaagccgacgcagccaaggcgctcgaagaggccgtggcccagtggcaggacaagtacgtccgcctgcaagccgagttcgacaactaccgcaagcgcacgctcaaggagaagatggacttggtgcagaccgggggccgcgacgtgctgctggagatgctgcctgtgcgcgacgatgtgcagcgcgccgtggacgccatgcagaagagcgacgatctggaggcgctgcgggcgggcgtgacgctcatttcacagaaatttaccgaggcgctccgccgcaagggcgtgaccgagatcgaggtgctggacaaggagttcgacgccgatttttcggaggccgttgcccggttcgccgccggcgacgagaagaagggcaaggtcatcgacgtcgttcagacgggttacatgctgggcgagaaggtgctgcgcttcgcaaaagtagttgtaggagagtaagaccatggcagaaaaaagggattactacgaagtgctgggcgttgcgaagaacgctaacgcagacgaaataaagaaggcctaccgcaaagcggccatccagttccaccccgacaaaaaccccggggacaaggaggccgaggagaaattcaaggaggccgcagaggcctacgacgtgctgtcgaaccccgacaagcgcgcccgttacgaccagttcggccatgccggaatgagcggcgcggcaggcggcggggccggcggcttcggcggcttcggcggcggagggttctcgatggaggacatcttctcgcagttcggcgacattttcggcggccatttcgggggcggattccgctcgtcgaacggcggcgggggacggcgcgtgaaccgcggctcggacatccgcgtgcgggtccgtctgacgctggccgagatcgccaacggagttacgaagaaactcaagatcaacaagaccgtcgcctgcgacaagtgcggcggctcgggagccagggacgccaattcctattcgacctgttcgacctgcaacggcacgggctatgtgacgcgggtggagaacaccttcttcggccggatgcagacgcagggcgtgtgccccacgtgcggcggcacgggcaaggtgatcaccgcgtcgtgcgacaagtgcaagggcgaaggcacgctgcgcgggcaggaggtcgtggagatcaagatcccggccggcgtgggcgagggtatggtcctcaccgtcacgggcaagggcaacgccgcgcgtcagggcggcgtgaacggcgacctgcaggtggtgatcgaggaggagcgcaaccccgaactggtgcgtgacggcaacgatctgatccacaacctgaacatcaccgtgacgacggccctgttgggcggtacggtcgaggttccgacggtggacgggcgcgccaagatcaagatcgccccgggaacgcatgccggcaaggtgctgcgcctgggcggcaagggactgcccgacgtgaacggctacggtcgcggcgacgaactggtggtggtggacatcaccgttccgtcgaaactctcggctgaggagcgaaaactcgtcgagcagttggccgcgcagccctctttccagaaggcggagtcggtcaagaaccagaatattttcgaacggatgaaaagcttcttcaggtaataatccgggatgaattattaatcgttcgtacattgattccggcttgtaattggcggcggaatgccgcgtttgcaaatctgacccacccctaaacccccgcctgaggcgggggcttgtcgcaatgcaaccacaataaagagagtcatgcaataaaattgcgaagatattcgtatctttacaaaaaatagaacgaccatgttaggctttacccctttcaaacggcacccgaacaaattcaattacatcccgcgttattacgaccccgagaaggaggcccgtgaacagcgccgtgccgagttgcgcggcgagcgcgccgaggatgccgaccgcgaataccagcccggacagtacatccgcacccagcgcgaagcccgggatgcgcggcgttcgaacgaggaggagcgggggcgtatccgtgtgctgaagatggccgcgggggccgtgctggtgctgcttttcatctacctgctctacccgaagctggccgatgtgttcctgcgcgcgcggaccgcacccgcgaccgaaacgcagcaggtcggggaggaggagttcaatccctatgcgcctattagggtcgttcccaacgattacgaggagtaaatggcagacaagatcagattattacccgaggtcgttgccaaccagatcgccgcgggcgaggtcgtcaaccggcccgcctcggtggtgaaggagatgatggagaacgccatcgacgccggggcgacttcggtgaaggtcaacttccgcgacggcggcaaggacctgatccaaatcgtcgacgacggctgtggcatgtcgcccatcgacgcgcgcatggccttcgaccgccacgccacgagcaagatcggggccgtggaggatatttacgccctgcacacgttcggattccgcggcgaggccctggcttcgatcgccgccgtgtcgcaggtcgaactgcgcacccggcaggccggcgacgaggtgggtacgcagaccgagatcaacggcgggcagttcgcggcgcagaacccggtgatgtgtcccgtgggttcgcagttcttcgtgcgcaaccttttctacaacgtcccggcgcgccgccgttttctggacaagagcaccacctcggcgtcgcagatcaaggccgagttccagcgcatcgcgctctgtaacccgcagatcgccttcgaactctacgccaacgacgctccggtctatacgttgcaggccggatcgctggcgggacgcatcgtcgacgtggtggggcgtcacatcaagcagaacctgctggaggtcgaggccgacacttcgatcgcctgcatcgagggatatatcggccgtccggctgccgccaagaaacgcaacacggagcaatacctttttgtcaacgggcgctttttcaagagcacctatctgacgagcgccattctgaaagcctacgagaagctgattcccgagagctgccagccctcctatttcctctacctgacgctcgatcccgggcgtatcgacgtcaacgtgcacccgcagaaaaccgaggtcaagttcgccgacgaggaggccgtgtggcagatcgtcaacgccgctgtgcgcgagacgctggccaaaacgggcgccgtgccgctgatggatttcgaccgggacagcccggtggagattcccgttttgcagaaaggagccgtgtacagcgagccgctggccatgtcgaacagcgactacaaccctttccgcgaggagtatatcgacccttcggcgcccgatccgaacgttgatttcacgggcttcgacgtgccgtaccgcgacggcggggtcgtgtcggacagcgcggtcggaggattgcgcacgggcggagtccggagcgccgcgccgtcgttcccgcaggccgcggcgggcggattcgccctgccgggtgcggacgccggggagttcgaggagttcgagtcgggcggcggtttcgagatcaccccttcgggcggcggattcgacgacagcgccctggatttcatcccttcgtcggccgttcccgagcagcagcggttcgacatgccgcagcgtccggaattcaccgatgcgctgccgctgccgggcggttatgtcgccgctctgctgggcggccgcttcgtagtggtcgacgtgcggcgcgcccgcgagcggattctttacgaggattacctccggatgctgggcaacggctcgtcggtgagccagcagttgctgttccccgaacggctggtcctttcgggcgacgaatacgccctgctggaggagaatgccgtggagttcgctgccctgggcttcgacatcgacttctgcggcgaagggaccgtcgaagtgaggggcacgcccgccgacatgcccgccgacgccgtggaccggctgctgttcgacctgttgcaggcctttgcgactccggtgtcgctctccgatgtgcggcgcgagaagatcgccggcgtgatggcccgctccggcgccaagggtgcggggcggaccttgtcgcgcgaggaggccgcggcgctgctcgcacagctggccgacacgggcagtttcagtttttcgccctcgggcaaggcgatcaccgccgagatcacgccggaagatttgcgcgccaagttgggataatccggcggaaaaagagttacatttgcaaaaattaaaacgcatgaaccgctattttcagacccctccggtggtcaagaatttgataatcatcaatgtactggtttacatggccacggcgctgctgcccgtcggcgacacgatcatgcagtattgcgccctgtcgctgggaacgccctatttccatacctaccagttcatcacctacatgttcctgcatgccaatttcgaacatatcttcttcaacatgttcgcattgtggatgttcgggcgtacgctcgaatacgaactcggctcgcagcgtttcctgaccttctacatggtctgcggcgtgggtgcggcgctgatccagtacctcacggcgctggcgttcggcgagctgccgctgctgctggtcggcgcgtcgggcgcggtgatgggcctgctgctggcgttcggcgtgatgcatcccaatgcggtcatcatgctgctgattccgcctattccgatgaaggccaagtggttcgtcatcatctatgccgtcatcgagctgttcctcggatggaggggcgtgggcaacgtggcccatttcgcccatgtgggcggcatgctgtggggattcctgctgctgcattggtggaaacgccggggaacgatccgtttttagacgatggctcccgattactataacggatacgggggaggcccttcggggaaacggcgccgcagtctcgtcatgcggctcgtcgacctggcgctgacgctcgtgacgctggccgtgggcgcgacgatggttctcacctatttcgtcccctatgtcgatccgggcagcgtgtggttctttcccgtgctggggctggccgctccggcggtctacgtcgcgtcggtcgtgctgacgctctactggatcatccgctggcgctgggtgtgcgccggggcgatgctggtcgtcgtcgtggcggggcttttcaaggtctcgctcttctggcgtcccgaaatccgccgcagctatgccacggagacggccttcgaccgcgctgctgtcaaggttatgagctacaacgtgcgcagtttctacggcgaggacggccggagcagcgtcgacgacatcctgcgcctgatcgaggagcaggctccggacctgatctgcctccaggagttcaatgcccgcctcgcggagcagtccgaggagttttcgctgctgggcgagaagtacgagattgcgcacttcggacgcacgcaggctccggattcggtctatggctcgacgctgaccatcttgagcaaataccgcatcctgcgttcggacaccgtgctgacgccttcgtcttcggtctgggccgacgtgattgtgggcgaggacaccgtgcgggttttcaacaaccacctgcgctcgacggccatcaacgcttcggacaaccagttcatcaccagccatcagtttctctcggacacggcgcgcgagaccaaaatccgcagtatcgtgacccgtttgcgcgagaatagcgtgcttcgggccgcgcaggtcgacagtatcgcgcaggttgtgggtgcgacgcgcacgcggcggatcgtctgcggcgatttcaacgatacgcccatgtcgtatgtctaccgcacgatggcgcgggggctgcgcgacgccttccgtgagtgcgggtcgggctattcgcatacgttccgcggtttctacaacacgctgcgcatcgactacgtgttgagcggcggtttcgaaccgctctcctacgaggtgcttccggtcgactattcggaccaccatcccgtcgtcgtgcggcttcggaaaagttcctgacgaattacccggaaaacgggatgccccggcggagacactctttccgccggttttaatttgccggcaggtgttgtccggaacgatttttttgctatcttgtggaaaaattcagccaatcgttcgccatgatccgatcccttccgctcgtaaggagaacgcttctcctctccgtatgtgggctgttccttttctccggccggctttttgccggaaatccgttgctgatgcctcccgaagccccttacggggcgccccgcttcgaccgtatccatgccgccgacatcatgcccgccattgaggagggcatccgcgcctacaaggccgggattgcgaaaatcagggcgctggaccccgcggaggcgactttcgaaaacgtcgtcgtgccgctcgactgtgccgacagcctgctggacgttccgcgcgcggtgctgggttacctgaaatcgaatttcggaggcgactccgtcatccggatctctctggaatccgcgcagctgaccggagaggcatacgacgccgtgacgctcgacacggcgatcttccgcctggtgaaggccgtctacgaccggcgcgatgcggccgggctggattcgctccagctgcggacgctcggcaaggtctaccggagctacatccgcggcggggcgctctgcacgcccgggcagaaggtgcggctcaaggagctgaaccgcgagatttcgctcaaacgcatccgccacgggcagaacatcacgcaggcgacccaggagttcgtcctgtacgtgcaggacagcagcctgctcgacgggcttgcggggacgacccggcagcgtttcgcccgcaatgcggcccggcaggggcatcagggcgtctgggccgtcgggttcacgaacggcgactatgcgtcggtcatggcttcggccacgaaccgcgatctgcgcaggagactctacgaggcctacacctcgcgctgcatggacgggaagtacgacaaccgccagttgtcggtcgacatcgtcaacctgcgtctcgaacgggcccggatgctgggatacgagaactatgccgcctacacgctggagacgaacatggccgggacgcccgaaaaggtccgcgaactgctgctgccgctcaaggacgctgccgcggggaaaggacgtgcggagcgtgccgaactggaggctttcgccgtgaaatacgagcgggattcggccttccggctggaaccgtgggacgtggccttctattcgggcaagctgcgcaaggcgaaattcgggtccgaactggggcgcatgcgcaactacctgcttttcgacaatgtgctcaacgacggcgttttctatgtggccaaccgtcttttcggaatcacgctgacgcagcgcacggacattcccgttttccaccccgacgtgctgaccttcgaggcgaaagacgccgaaggccgccccctcggactgctttatctggattgcttcgtccgcaagggcaaacgcggcggcgcgtggtgctcgcgcctgcgcgggtattcgtgcgccggagagcgggaggtgctgccgctggtgaccatcagctgcaacttctcgcgtgcggccgaaggcaggccgaagctgctgtcgacctccgaggtcaagaccctcttccacgaattcggacacgctctggcgggtttcctctcgcgcgggccgtatccacaggtgacgggcagcttcccgcgcgacatggtcgaactgccctcgcagttgaacgagcattgggcctgggagccggaggtgatgaaacactacgcccgcgattacaagacggggcgtccgattcccgatgcgctgatcgcgaagttcaaggagtcggagaacttcctgaaggggctttacctgaccgatttctatgccaccgcgctgctcgacctcgaatggcacaccgtgctgcggccggtcgaagggtgcgacgtggcggctttcgaacgggcgttcctgaaacgttacgacttcccggagcataccgctttacgcttccggacgacctattacaaccacatcttcgccagcagttaccccgcgcagtactactcctacacgtggtcggcggtgctggacaccgatgccttcgcggcattcaccggcacgggcgatattttcgattccgaaaccgcgcgccgttaccgccgccatatcctgaccgaagcgggctatgacgagccgctggcgcagtacgtgcgtttccgcggcgccgtgcccgacgtgaagcccctgatgcgccgttacgggctggcggaatagcggcccggcggaatgaacagccccggctcatcgggccggggctgttccgttcggtcactctccgatcttcttgcgcgggtggaccatgttttcgggttgcagcaccttgtgcaactcctcttcgctcatcagcttatgctcgagtacgaggtcgtagatgcccttgccggttttgagggcctccttggccagcatgctcgacgtttcgtagcccagataggggttgagcgcagtcaccagcccgatgctgttaaagaccatccggcggcagacctcctcgttggccgtgatgccggcgatgcacttctcgcgcagcgtgttcatggcgttgatcagcatttcgatgctctcgaacaggcagtggacgatgatcggctccatgacgttcagttcgagctgtccggcttccgatgcgatcgtcacggtgaggtcgttgccgatgacgcggaacgctacctggttgacgacttcggggatcacggggttgaccttgcccggcatgatcgacgatcccggctggcgcggcgggaggttgatctcgttcagcccgcagcggggacccgacgagagcagccgcaggtcgttgcagattttcgagagtttcaccgcaaggcgtttctgggccgaggagttcataatgaaggcgcccgtgtcgctcgtggcctcgatcatgttcgacgcctcgacgagcggcagtccggtgatctcgcgcaggtaacgggtgcaaagcccggcgtagtcggggtcggcgttgatgcccgttccgatggccgtggcccccatgttgatctcgaagaaaagtttcatgttggccgtcagccgctcggtctcctcggtgaggttggcggcgtaggcttcgaactcctgtccgagggtcatcggcacggcgtcctgaagctgcgtgcggcccatcttgatgatgccggagaactcctcgcccttggcgtggaacgccgcgatgagttcgcgcagcgaggccaccagtttctcgatgctgcgcaccagtgcgatcctcacggccgtggggtaggcgtcgttggtcgactgcgagaggttgacgtggttgttggggtggcagaactgatattcgcccttttcatggccgaggagttcgagcgcccggttggcgatcacctcgttggcgttcatgttggtcgacgtgccggcgccgccctgcaccatgtcgacgacgaactgctcctcgagtttcccggcgcgcagctcctcgcaggcccggatgatcgcgtcggcgatcgccgggtcgagcagtcccaggtcacggttggccatcgcggcgccctgcttgacgtcggccagggcgcggatcagctccgggaagaagttgagccgcacgcggctgatgtggaaattctccaccgcgcgcatggtctgcacgccgaaataatactccgccgggatttccatttcgcccagcagatcgtgttcacgacgggttttgcccgaaagtctgatttccgtaaagtccatgatcggtatgtttttattaaaggtacgcaaaagcagggtggagtccaagccgaatcgggtgcggtccggtaagacgttccgacatcaaatataatgctttttccgccactttgtcaaaacaaaaaatcttgttaactttgtattcgctccgcggggtcgcagaattcggcggcggacgaacgcagaaccgaaaaacaaataaagaatatgattttagactctctgaaaaacagcgcgctttactacggcgtaagcccgcgcatgaaacaggctttcgaactgatcgcctcgaccgactggacgacgatggaaccgggtattcacgaactcgacggcaaggacatctacgtcaacgtcatggagcgcgagctgaaacagaagcccgacgccaaactcgaaatccacaacgagtacatcgacatccaggttctcatccggggcgaggaggagtccttcggctggagcgagcgcagggagctcaagaagccgctgggcgaattcagcgtcgagaatgacatccagctcttcgacgacgtgccgcagacctattacacgatgcgtccggggcagtttacggtgcttttccccgaggacgggcacgccccgatggtgggcgagggcacggtgcgcaagatcatcgtcaaggtgcgcaggtagacgcagtccataccttccgggccgggatttcccggccttttttgtgcccgtccggctggcctgcatggccggtcgggggcggagaacggcttcgtccgacctccggccggaaatgaattgaaagaaaaccgccgcgaacttgcttgtcttccggatttgtactaaatttgtggtacgggtatttccgtacgctatgaaaacatcggtcttcatattcctctttctgctggtctcctccctctcgtccgtcatggattcgggggcgaagtccggagtgccggctgcggctgcggtccggcagacggcggaatgtttccttgccggtttcaaatacggggactgcgtggcgacggagaccgtccggacggccgtgccttgccccgtgcggtcgctgcgcaagccggtggaaggtccgcagcgggtgtcgggcggcgaccgtgacgtctgctccgggcggcatttcccgctggcgcagggctgctgcacgaaatacgtcgtctcttctttattgcgcggcgggcagaccgccctgcctttccatcgcgccgactacctccggttcggcgttctggtcatttagccgtcaaatcctttcgctttcaagcgtatgatgccgtccgtgcatcgtacgtcggatttccgtgtgcggactccgggctgtcgcaccgacgccggtgcggcgaacgacgttcggcatgctttgccgcatgcgcagaatgttccggcacacccgatggtaaaactttgatgaatgtaaaaaaatggatttgatgcatatgatcggggagacgtcgctgatgatgggcttcacgtttatcgtgggaatggccttcgcgtacgtactcaaactgatgacgtttttcttctcccggcttaacggaacggagatctccgcgctgttgagaaaaggccgcatatggggccgcgcctaccgcatggacattgcgcgtaccgaccgctacatccgttcggtcgcccggatcggcggggacgtttccgccgatccggatgcggaccatgcgatggacgctctggccgaataccacctcggcacccccggggatgccgcacggcaagacagcgagatgacccgtttatacgagctgcaccatggaacggtttgatcttggcaatattttccagggaatctcgaccctgctgcaagccgattccgcgatcatgtatgcgcgtatcgggctgattctgttgggcatcctgctggtttacctggggcgcaggggcgtgctcgaaccgctggtgatgattccgatggggctgggcatggcggcggtgaacgccggggtgctgatttttccgggcggcatgcacggcaacctgtttctggaccccatggtcacggaaaccgaccagctgatgaacattttgcagatcgacttcctgcaaccgatctacaccttcacgttcagcaacggactgatagcctgtctgattttcatgggcatcgggacgatgctcgacatcaatttcgtgctggcgaagcccttgcagagcatgttcctcgcgctgtgcgccgagctgggcacgttcgctgtgctgccgatcgcctattcgatggggttgagtcccagcgacagcgcctcgatcgcgatggtcggcggggccgacgggccgatggtgcttttcacttcgctcaacctctcgaaggagatcttcgtgccgatcaccgtcgtcgcctatctctatctcggcctgacctacggcggctatccctacctggtgcgggcgatggtccccaagcgtctgcgcgccatcaagatgaaaccggcgaagaaaccggtgaagcagtacagcgccgcgaccaagatttcgttcgccgtggtgatgtgcgtgatcctgtgcctgctcttcccggtggccgctccgctcttcttctcgctcttcatcggtgtggtgatcaaggagtcgggactcaagcatgtgaacgatttcatcagcggaccgatgctctacggttcgacgtttttcctgggaatcctgctgggcgtgctgtgcgacgcgcacacgctgctcgaccccacggtgctcaaactgctcgtcctggggattcttgccctgctgatttcgggcatcgggggcattttgggcggttacctcatgtatttcttcaagcggggcaatttcaaccccgtcatcggtatcgccgccgtcagctgcgtgcccacgacggccaaggtcgcgcagaagatcgtcgcgcacgacaacccctcgtcgatgatcctgcccgacgcgctgggagccaatatcatgggcgtcatcacgtcggccatcatcgcagcgatctacgtgacggtggttccgatgctgtgatctgaaagagaaccggcccgcttccgcgggccggttttttattttccgatgccgaagtagcggaatcccgccgcttcgacctcgggcttgtcgaaaatgttgcggccgtcgacgaccgcgtcgccccgcatcgtcgcgcgcagctgtgtccagtcgggcatgcgcaactccttccattcggtcaggagggccacagcgtcgacgccttcggcggcctcgtacatcgtctgggcgtagcggatcggcaggtcggccatccggcggcggctttcgggcatcgccacggggtcgtaggcccgcacctcggctccggcatcgagcaggcggccgatcaccaccgttgccggagcttcgcgcatgtcgtcggtctcgggtttgaaggccagcccccagattgcgacgaccttgccccgcaggtcgcccaacgcggtctgcaatttctcgaaaacaatccctttctgctgctcgttgacccgctcgacggcctcgatgacctgcatcgtgtagccgtgttcccgggccgtgtgggccagcgccttcacgtccttcgggaagcatgaaccgccgtagccgcagccggggtagaggaacttgttgccgatgcgggcgtcggagccgatgcccttgcggaccatctccacgtcggcgcccacgcggtcgcacagattggcgatctcgttcataaacgaaatgcgcgtcgcgagcatggcgttggctgcgtatttggtcatctcggccgagggaatgtccatgaacagcacgcggaaattggtgatcaggaacggccggtagagcttggccatcagcttgcgcgcccgttcgctgtcgacgcccacgaccacgcggtcgggcgacatgaagtccttgatcgccgcaccttccttcaggaattcggggttcgaggcgacgtcgaacgggaccttgcagccgcgcttctcgagttcctcctcgatcacggcgcgcaccttctgcgccgtgcccacggggacggtgctcttggtgaccagcacggtgtatttccggatgtggcgaccgaaggtgcgggccacgtcgagaacgtatttcaggtcggccgaaccgtcctcgtcgggcggggttccgacggccgagaagaccacctcgacatggggcaggcactctgtgaggtcggtggtgaaatgcaggcgtcccgcctccacgttgcgccgcacaagctcctcaagtcccggctcgtagatcgggataacgcctgcgttcagaccctctatcttttcggcgtctatgtccacgcaggtgatgtcgagtcccatttcggcgaagcaggcccccgatacgagtcctacgtaacccgttcccacgattgcaattttcatcataattcctggagttttttctttcggaatgtaaatatagtctttttttcgaaatatccccgccgcagtacgaaaaagggcggtccgaagaccgcccctgcgtcgttctattttccgcacctgcatccggcgacagcctccgccagcgttgcgcagggatcgcacatctcgtgcgagtagccctgtttcatctccacgggatcgcacaggggttcccacttcatcttctgggcgaactccgcgagcaggcgcaccgaggctccggcccagcagaacgaaccgaaccagccgaatctgcgccggggaatgccgcgcgcggcgatgcggtcgagcagttcggccacgggcgggaacaggttgccgttgtaggtcgggccgccgacgatcagcgtgtcgaaacggaaaacgtcgcgcaggaccactgacgggtcggcgtaggagaggttgtagacccggatcgggccgacctcccgcgaggccagttcgcgcgcgatgcgctcggccatctgctccgtgttgccgtacatcgaggcgtaggccacgaccacgcccggttcgccttcgtagcggctcagacggtcgtaaatatccagaacctttgcgatctgccgctgccatacgggtccgtgcgtcgaacagatcgttccgacgggcagcgtgcggaccttctggagcgccttctgcacgggaccgccgtacttgcccacgatgcaggcgtagtagcggcgcatctcgtcccagtagcggtcggtctcgacctgcgaatcggtgatgccgccgtcgagcgccccgaacgtgccgaaggcgtcgccggagaagagcgtccggtcgccggcgcaccacgtgaccatcgtctcgggccagtgcaccatcgggatcatgtggaacgacagcgtcttgccgcccagatcgagcgtgtcgccctccttgacctcgaccgtgcccccggcgatgccgtaaaacccttcgatcatctggagcgtcttggcattgccgacgatctcgatgtcgggatagatgcggcgcagcgccgcgatcgacgacgagtggtcgggttccatgtggttgacgaccagataatcgatcttcctttcgccgatggcctcgcggatgttggcttcgaggcggctgccgaaggactcttcgacggtgtcgatcagggcgatcttttcgcctgcgaccagataggcgttgtacgacacgcccatcggaagcgaccagagggcttcgaagcgcgtggtggtgcggtcattgaccccgacgtagtggatgccgggaagtatttcggtaattgccataaaccttttttgttttgttttggcacaaatttacgaaaaatatttttccggcgctactgccggcttttttattgcttcggcaagttgcatgccggggtgcggaagagtcccgtgcgcggcgcggccttcgcccggaaacaaaacgccgcaacccggtgaagggttgcggcgcatgccggcaggacggcggttcagaggaaccgcggcatatcttcggccctgctttggggtgtggactccagcgcgccggagatgatctccgacgggatttcggccttgacgaagaccgagacgtcgctcgtgctcgaagtgctggtcagcgtcatccgtgttccgtccgcgttgaacgaaacccggtacgaggcgcttccccacggggtgttgtcgctgtaccggccgctgagcgtgggtttgtcgtaggaatacgtgccgtccagatggacgtattcgggcttgtagagccgctggtagatgtcgaacgaaccggactcgctgaacgagaggtagacgtcggcggactggagcgaactccacgaaaccagatgccagctgccgacgacgttgccgtcgccctcgggttcgggcgtatccttggacgaatcgccgcacccggtcagcgcgaacgccgcggcgaggccgatcaataacagtttgatgcttttcataatgtgtccttgttttataaccaacctccgttctgggaatgaacctcacgtgcgatgaaggcgaattccttcgtgatcggcatgccgttcattccgctgttgttgccgtttccggcgagcagcttgatccggaccaccgccgaaccgggtttggtgcacttgaggatgatctggttggcgaatatggtcgggttcgccgaaatgcccagccggttcatgtcttcggccgaaatggagatttccgtaatcttcaggtccagatttccgccgccgaggtacggttgcaggttcagcgtgtactggctgccgacgggaatcgggatgcaggtgatgccgcggacgttcatcagcacctggtaggcgtcgatgtaacccgtgcccattccctttttgtactgcgacaggtcgagcgtcgccagactgcccttgtctgtgaaatactgtttcgttccggtgcagtattggttgatgtcgtttaccgatgtcagcagcagcgtcgtgaattcgttctgggtgaaggtcttgccgagttgcagcgcataggagagcccgagcgccgccacgcccgaaacgtgggggcaggccatcgacgtgccctgcatgtagccgtactttccgccgttgacggtcgataacacctcggacgctccggtatttatgttttccagatacgactggtaggcgtcgccgccgggagccgcaatgttgcagccgggaccgtagttggtgtagtaggccggggtgtagtcgcacgacatggccgttacggagatgtagtcgcggtaagcgccggggtagctcgacatgccggtcatgtcgttgccggcggcgaatatggccagtcctccctcgatggccgcgcagttctgtttggcgatgaagtagtcgatggcctgcttctcggcgctggcgccgctggaataggccgcgtcggaggttaccgagccggcagggtagccgtagctgcactggatgatcgccgcgccgttgtcggcggcgtatttgatggccttggccgccatggccacgtcgccgccgtctttgtcgtggaaaatctgacaggacatgatcttcacgccgtcgtttttgcccgagccgcctgcgatgcctgcgacgcccgtgccgttgttgttcacggctgcgaccgttcctgccacgtgcgtgccgtggtccggtgcatcgcctttggtgctgatggtcagcgtcgtattgtcgacgaagttgaacccgtgtatgtcgtcggcatagccgttcgagtcgtcgtcacggccttccgagccgttcagctcggcggtgttggtccacatgttggcggccaggtcgggatggtcccactgcacgcagttgtccacgaccgcgacgataacgcgcgggtcgcccgtgcagagcttccaagcctcgtcgcagttgacatcggctcccgccttgatcttcgaatagatcgacttgtcgccggtgttgatgtagtgccattgtttgcccaggtggggatcgttgaacccgacggccgcacgggtctgcggcgcagcgccggtttcggccagcgggatgacccggccttcgtgcacgtgcatcagctgctggttgaattccaccttgctcacttcggcgatccgggccatgtcgagggccgccttgtcgagatcggcggcggcgtcgaactccacaacgtaccagcggtgcagaccggcggcgcgcgtgcgctcctcgttccgttcgtctaccgggaacagacgctgtaacgcctttaccccgatgctgccgagcacggcgtcgaaatcagcgatgcccgaacgggtggcgacgccgcccgaacgcgtaacctgcatgaccgacgattcaatgcccgctacggcctcttcgccgaagcagaccagcagttcgcccctgacggcgttctccgacgagaatacgagtttggaggccgctttcgcttccggttcgggacccgtcgcctgctccgtcgcatccttggtgcacgaccccagggcgagcgccgcagacaggagcagcaggctccataaagttgttgtccttgtcataatcttataatcctaatattagtgcatgtcgtgaccgatgtttcgtttcattggaccacagaacccgacacggtcgctcggactgtgtcgggtcgtgtggaacaatatgcgtcggttatttcaaaaccgggaggttttcgcggattttgaaatcggcgcggcggccgatctgtttcggcagcggctcgcatttcgccgtcttcacgcttaacgtgcggacgccgtggttcgtgttgtcgctgttcctgacgaatgtggcgttcatctggagaccacggctgtcgagcgacttcccgatatgggccggaacacggacgctgctgaacgggatcttcgtgcggacgccctgaactttggctgcggatgctgcggatgtcgttccgctctgcttcgtgatggtcgttccgtcggcatagtatgctgccaaggctccgacgatcttgttgacggtgaaatcagcaacgggaacctcgacgtcggtcgtcagcgctgaaacttgtttcgacgccggatcgatcgtcaatacgatcggatcgctgccttcgctctcttcggttgcgaacgagaagataccgtaaccgcgggacttgtccggggtgagcgcctccgtgaatttgccgagcaggttgccgttgtcctcccggccgagctgcacgccgctcatcgtgagcgtcgacttggccgagtcataggttgcgtaccattgggtgccgtcctctacggcgaaatccttcacgaaaaattcggtgttgcttccgacggtaggtattacctcgaatacattttcgaacgtgtcttcagcgctggccgcgtaggacatgccgtatttcccgatgatcaactctccggtatagggcggtatgtccgtcacgaacggttcgcacacgatcagttttttcttgccgtagttgttcgttgcttcgacaaccagcgtataggatgcgcccggtgtcagattgatcattatgtcccaatattttccggtcgttgcgagttcttccatcgcatcggcattgagttctttaccgtatttatcgactacatcctgcagggtcaggcctccggtttgaatctcgatattgtcgattatggaagttttgttgaagtaggttttgatcttcttcatctccgtgccggtgatctcgtacacggccgatgagtaatcgggatactccgatacatatgctgcggcatcgggataggcgctgactttatagagcgagccggcgatgtcgttgggaaccgaggtccctcctatgcccgggaagtagaacgatgctgcggaagcttcgccggaaaccggtttttgcgctttgtcaaggggcagggcgactacggtataggttccgggtccaggcagtacggcttcggcggagactttctcgccgcctacggtgaagtcctgcaactcgttgatgttctcggctgatccgtcggcgatcgctgcgacaagcgtagcggtttcggcctcggtcaattcattttcgacgagaacatagcggatgttcgtaacgtcggcgccgtaggtgaagtcgatgacggcgctcgccgtctctccgtcggcgctgaccttcatgccgtcgtatacggcggagagcgtatagtcgactatttcggcgcccggcagcatgatgcggaacgtaccttgactgttagcgggaaattcgcgatccaatccgacgagttttgcggtcaatccgtccttcgggaaggtgatgacgccgttgaccaatgtgccgggttccgccgaggcgatcataaagtttccgtaaccgttactgttttcggtaatacccgaccattgttcttcaatcgtcacttgagtcgcattgctgcaatcgatgacgatattggacggagtgtagctgaactgctccgaaagctcctcttgcgtagctccgaagaattcggtcatataaggccagccgagcatctcttcaaccatgtagataccttctttcgacttatggctgtgtaccgtgacatcgatttcgaacatattgccggtgaatacatcgctcaaccagccttcgcggaatttgccggttcccattttcacccacggccagggcataaccgtaatatcgaggctgcggttgccgtagggcgtcgtgttgtcctcgtcgttgatcaggaacgaaagggggtattccttgccgtcttcgagtttggtgcggtcgaaggtgatcagcagttcggaagtctccttgccggctgcgaacgataccgacgacggaatggtgaacagacccgactcgtcgctggcgagaaccgctacggtcagcgcctcgtccttggcgatgcgttttaccgggatggcgatggaggagacgtcgtcgctgatgctatgctgggtggtcacattctcggggaagtagacctgtgcgccgtcgacctcgggacctgctttgaagtcatcgtcgctgcaggccgtgaacagccccgcgacgatggcgacagtcgccagaaagaatatttttatacttttcataaatagcgatgttttttatttaacagacttgaccgtttgggtcgggttggggttgttcttgcccgcaagcgccttattctgctgtacggcgttcagcgggaacacgcagttccaccagggggcgcgtccgtccgtggaaagctgggccatcgggggagcgttcgtgccggtgtcgccgttgtgcatgccgatgttcagacgcttcaggtcgtagaagatgacgccctcgccccagaactcgatccgcttctggaaaatgatctcgtcgatcaggtcgttggccgccggaaccgtataggccggatcgcggttggccatgaacgactgcaacagcgacttgccggtggtggcgtcgtagtgcgccgtagcctcggcctcgatcaggtacatctcctcgacacgcatcatcgggatgctcgtcacgttacccgtggaatagtttcgtttttcgccgttggccgcgtggaacttaaacgatgcgtagggggctatcgttgcgaactcctcctcggtcagggtcgtatagggtgcgatggcgtcgaacgagcggtcggctccgacaaagctctttttgcggaagtcgcccgacgaaatgcggttgtagctgaataccgagatacccggctgcgctccgtagccgtaaccccagatagcctcggtcgccatgtgggccgaccacgacagcaggttgttgagcacggtgtcggtggtctggatcatggcccacatccacgacgaattgaccgtgttgaacccggtcttcgggtcgagccactggctttcggtcataatcgtgcagcccgaagcgtcgatggccttgcgggcgtattcggcggccagacggtaagcggcgtcgccggtcggaacttccgcatacgattcggtgaatccgcccagccagaggtaggcgcgggccttgagtccgtagatcacggccagcgagggcaggtttttcgttgccggcgtatagttggccagcagggtctcggcggtgttgaggtcctcgaagatgaacttgaacatctcctcacgcgatacgcgcgggttgttctccagttcctccatgctcgtatcttcccggacgatgggaacggtcagccccttgacggcttccagctcggtctcgtaggcgggacgttcgggagccttggccggcagcgcgtcgtagagacgggccaggtcgaggtagcagagcgcgcggaaagtcttggcaatgcccatcatctcctctgcgccttcgctctggtttgcgatgtcgatggcctcattggccgtgaagatgaacttgtaatagttggtgtagaagaacggggacatcgtgccgttcgctgccaatccggtcgagttgcccggatagagccatgcctgccagcggtcgtagtactggttgccgcccggcaggttgccgctgacggggaacacctcgccgaccatgcggtcggtggcgccgaagatgcccgggtagccgaagtcgatgtgctcgccgaggtctatatagttggtgatgagcaccgtcggcatcgcagtgataagaccctcctttgcgaacggagattcggcagtctgatcgctggtggcgtatccgctttcggggaaggtctccttgatacagcccgaaagaagcacggatgaaccgagaagcagcgccgttgttttcagtatgttgttcattttcataatattcgtcgtttaacaaattagaacgttacggttacaccgcccgagaaggtgcgaatcggggcgtagtagtacgggttcgtgattccgttgatggactgacgcgggtcgagaccctgacgcttggaccagtaccatacattgtcgcaggcgaggtagatacgcagattctcgacgaggaacttgcgcgtgatacgcttgggcagcgtatatccgagcgtgatgttctggatgttcaggtacgatgcgctggtgaggaaacggtccgagacggctgcctgattcgagtcgttgtaagcaaaacgcggaatgttcgaaccggagttctcgggagtccacgaattgagcaggtcgtggtggtagttgtttccggtcgacgttcctgccggggagttcatgtagaacctgtagccctggtcgagaacctgtccgccgagctggtaggtgaagccgatcgagaaatcgacgccgtagaagcgtagcgacgtgccgaaaccgccgtaaacgtccggcagggcgtctccgtgcatttcgcggccctcctgcgaggccaccgagtaatcggaggtcttgatgcgctccttgttgccggcatcatcggtcttgtaggtgtaccacagcgattttccggtctcggggtctactcccgcgtaggtcggaacgtagaacgagaagacggattccccttcggtgaggaatttggtgtcctgccagcggcccacgtgtttgccgtcggccgtcgtgttgtttttgaactgctccggcaggtgggtcaccttgttcttgtagtgggtcatgttgagcgagaagtcccacacgaggtttttggtccggatcaggtctgcgttcagttcgatttcgagaccgcggttgaccatgtcgccgatgttggtgaaaatggtcgtgtaacccgactcgatcggagtcgccagctcgaacagcatgtcggtggtcttgcggttgaagacatcgatgctacccgacagacggttgtcccagaggccgaactctacgccgacattgaggttggcgttggtctcccaggtgatgtcggggttgcctttctggtagagtacgctcgtaacgccgtcgccgctgctcaggatctcgcggtagtcggtatagcggtagtaggattccgctttcgatccgaggttgtcgttaccctgcgaaccgtacgatgctttgaccttcagcatgttgacccacgaagcgttgaaccagctctcgcggttgatgatccaggctgcgccgagcgaccagaagttgccccagcggtggtcggggtggaagcgcgacgatgcgtcgcggcggtacgatcccgagaaatagatgcggttgtcgtagtcgtactgtccgcggaagaagtagccctcgttgttgtactccagaaccgacgaacccgaccgcgacgagtcgacgacggcgccgctgagttcggtgttgtccggcgagaacatcatggtcttcgagccgtacagaccgtaggatttgcggttgtacatttcatggccgaagagcaggtcgaggttgtggacgtcggcgaaggtgttggtgtaggtcaggaactgctgcatgttgtaggcgatctcccgactgtggctcttgaaaacggcgccgcccgattcggcgaactgtccgtagtaggggttcgacacctgcgtaccgcgggtttcgtcgagcgacacgcttccgttgagggtcagtttcaggcccttgtacagggagaaatcggcaaaaccgttggccatgaaggcattgccctcgttgatgtatttgttgagctgaatgtcctgcaggtcgttgctcttgccgccgttggtgcgcagtgcgccgccgttgcggccgtcgccggtatcgtacatcttgaatccgtactcgtcgatcataatgttgccgttgccgtcgcgcatgtagaccggatagatcggcgccatgcggatcgccgtggcgaatgcgtttccgccgtcggcgttgccttcgccctgaccgtcgccgtcgtcgttggttttgttgccgttgttccagacgaaatgggtgtaggacatgttaccgccgactttcagccactttttggcctggtagtccgcgcgcagacgggcggtgtagcgctcgttgctcgaaccgtcgacgatacccgtgttgtccagatagccgagcgatgcgaagaaattggcgcggtccgtcgcgccggaaacgctgacgttgtactcctgacggaacgacgacgatttgtagatttcgtcgagccagttgtcgggttgcaggtagaactgctggcccttggcgtcggttaccaggcggccctgcttcgcacgcggattgagacggccgttttcgccgatgaggttctggccgtcgggcacggtgaagacgttgtaacccagaccgccgggatcgttcgacgtcagcagcttgttggcggcgatgttggcggccaggggagtgtacttctggtcgagcgtgtaatagttgtacagcgacttgtagtgcatctcgtagtattcgcccgcatcctccacgatgtcgtaggtctgcaacgcacgggtgttgatgccccacttgccgtcgaaagtcacggtggcctcgccggccttcgcacgcttggtcgtgaccatgattacgccgttcgcgccgcgggagccgtacagggcgttcgacgcggcgtccttgaggacgctgatcgactcgatgtcggcagcgttgatgttgttgatgtcgccttcgtagggcacgccgtctacaacccagagcgggtcgtttttggcattcatcgaaccgtagccgcgcacgtaaatcttctgaccggaacccggacggcccgaggcggaggagaactgcacgccggcgattttgccgacgagggcatccccgacgttcgaagactgcgtttttatcagatcgtcggatttgatcaccttcgccgctccggtgaaggcgtctttcttggctgtaccgaaggccactacgatcacgtcgtcgatggcctgtgtgtcttctttgagcgagatgttgattcgggtcttgcctccgatggccaccttctgggtttcatagccgatgaaggatacgaccagcgatccgtttccgggagccgtgatggtgaagctaccgtctccgtttgaggtcgtgccgacatgcgagccgtcgaccataaccgttgctccggcgaccggtttcccgtcgggaccggtgactgttccggaaatttgcttactctgggccagcgagagtaatattccccccccccaataaagcaattaacgatagtagaatttttcttaccataagcgttaatctaatagtttttttttaaataaaaagttcacaagcaaaggtatgaaattgctaactcgtttacaaataaattattaaaataattcaccagtataacatatgtgtagaagattggtcgataacggttacgattttgaaaatatcatctcaaggggattacaaattgtaatccccttttcgggtgttttcgggtgttttgagcgaatgtgttagctgcgtgaacttctgcgtatatgtgaatcggtcctcaaaggcgctcccggactttttccaggtcggtatcgcggtacagcgtatcgaggcgtttcgagagccgctccatgtcaccgtcgagtttcgagtgggtgatggtcgcataaatctgcgtagtccgtatgttcttatgtcccagcagcttgctgatcgtttcgatcgccattccctgcgaaagcgtgatcgtcgtggcgaaggtgtgccgggccgaatggaacgtgatgtgccggggaatgcccgccagagacatgatgcgctcgaggcagatgttgcaccagccgttgctcggcaggcggaatatccgcgcattccgctgcatcggtttgtatttcagcagaatggtgtacggtatcgcgaagatgcgcacgttgaccgcagatcctgttttgcggcgggtggtgctgatccacagctgtttgccgtcctgctggatatgctgcggggtcagcgtgcagaggtcgatgtaggagagtcccgtgaagcaactgaacaaaaatgcatcgcgtaccaactgtaaggtcatgtcgtcgaggtccagacggatcagcttgcggatttcggtcatggacaggtagtttcgcgcgacgaattcgctgcgcagtttgtaattcgcgaagaggtccttggccatgtgcccccggcttcgggccagcatgaggatgtgcttgaacgcgatcatgtagatccacgtcgtgtttttcttgtgtccgcactcctgtgcgatgtagtggtgaaaccccgtcaggaactctttgtcgagttctttgaacagcaaatccttgcggttgaatttgtcgttgacgtagttttcgagatgcttgtaaacacacctatatttatagtaggtcgttttgctgcggctgatgcccaccatccggctgaactcctcgttgtgatgcctgaagaaggccaacagcgtttcgttgcgctggtcgttgccgaaatacatctccttgaccattttcggagtgaccagggcatgctcgtaaaacagcgtgttgtaacatctttcgatgtggaaacgaatctgcgagagttgttcgttgacatgtgaggcaaccgcgctgcgccctgccgcccgtcccatactcacatcccagagattcggattcacggatagttgcgtggacagctgcgttcgctgtccgttgatcgtaatgcgtcccatgatcggcgtgtttccattgcgtaaaggcgcattcttcttgatgtaaaacagtactttgaacgtgtttctcattcccttcctaaccttttttaaacaataaacaaaccgcgataaaggtaatgataaagttactgccaaacggtatatcaattggaccaaatagcttatacggcacggtttaacccttcttgtccggtaactatctggtaacacaacccggacgcgcggaggtgtcgtctgtatatcttacacgcttaataccaaactattaggcatttctcggaaaatgcgttccggaacgctgtaattatcctatatccagcagtttattatccggaatccggggcgattgttttttattttaaaattttattaaaattaacgcttatggtaagaaaaattctactatcgttaattgccgttttgggactttgtgtatatggattcgcccaaaaccggcaggtttccggtaaagttgccgatgcggagggtaagcctgtcgcgggcgcaaccgttatggtcgacggcacgtcgaccggtacgaccacgggcacggatggtaaattcaccatcgccgcacccgccgacgctacgctggcggtttcgttcatcggttacgagacccggaaagtggctgttgccggaaagacgcatgtcgaagtcgtgatgcacgaagatgcgcaggccatcgagaatgtcgtggtgaccgctttcggcacgacgacgaaaaaagatcttacgggatcaatcgccaccatccgcggcgaggagcttgcgaagcgtcaggtttcgaccgtttcgaaaatgctcgaaggagcggttcccggcgtgcagctgactacggccaccaaccagcccggtacggacgctgcgatctacgtccgcggcgtcggttcgctcaatgcgggcaccggcgcgctgatcgtgctcgacggctcgccctatcagggcagcctgtccgacatcaacccggccgacatcgagtcgatctccgtgtcgaaggacgccacggccaactcgctctacggttcgcgcgccgcgaacggcgtggttttcatcacgaccaagcgcggcagcctggacaatcccacgatcagcgtcgacacgcgattcggtatcaacacccgcgctgtccccgagtatgacatcatcaccgatccgggcgaatacctcgaggcgcagtggcgcacgatgcgcgacacgaagtgggcgtcaagccccgaagagggaggcggcgatctggctgccgcggcgctctatgcctcgcaggaggtgctgggggcacacggaaattacaacccctacaaatatttgtcgacctacctgatcgaccctgcgaccggcaaactcgacccgtcggcccggcgcatgtacagcgagcgcctgcaggacgaactcttcaagaccggattccgcaacgagacgaacgtttcggtcagcggcgggaacgagaagtccgactatttcatctcgctgggttacctcaaggacgaatcctatgtgatcgaatcggatttcgagcgttacagcgctcgtgtgaacgtcaacaccaagctccgcacgtggatcaaggtgggcgccaacctctcctatgcccacacggtgcagaacaacattctggagggcagcagcctcgcttcgtcggcgttcgccacggcgcgttcgtgggagccggtttttccggtctacgcccgcgatgccgaggggaaaatcaagtatgacgaaaacggcgacaaggtctacgacctgggtacggggcagaccgacggcacgacgacccgtcccggaacctcgggccagaacatcatcgccacgctgaagatggacacgcgcgacatcaaacgcaacaacttgcagggccgcgcttacggggagatctatttcctgcgcgacttcaccttcacctcgagcatgtcgctgggctatcgcgcctccgacgaactgctgttctataaccccacgatcggcgacggacgcggttccaagggccggatcaacaaaaagtctacggacgtttacgatctgaacctgatccagatgctcaattacaaaaaatccgtcggacgccacaatatcaatgcgctgatcgggcatgagtacaacagctgggtgcgcgattacgccgaggtcgagaagacgaacatttacgatcccaagaatccgcagctgaacaacgccggcgagatggggtcgatcaacggctatcaggacgtgctgcgcattcagggtttcttcggcaaactggagtacaactacgacaaccgttattatttctcgggcggtatccgccgcgacggaacctcgcgtttcaaatacaatccctggggcacgttctggtccgtcggcgcttcgtggcgcatcggagccgagaagttcatggagagtacgcacagctggctttcggagctgaaactccgcgccacgtacggtacgcagggtaacgaggacctggccaactactatccctataccgaccagtatacggttaccatttccgaaggcaagctgggtacggagatctattactacggcaatcccgatctgacgtgggagaagcagaggacgttcgatctgggtctggacgtgggtctgctgaacgaccgcatcaacctgacgatggactacttcatccgcgtgtcggacggtctgctcttcaagcgtacgaaggatatttcgacgggccgcgcctacgactggtacaacgtcggcaaactgcgcaattcgggcttcgaattcgacttgaacgtcaagctcatccagaaaaaggactggtactgggacatgtcggtcaacggttacacctatgccaacaagatgctcaacctgcccgacgagtacaaagtctcgggcatgcccaacggcaaccagcgcatttacgaaggcaaggacatctaccgctgggagatgcggcagttcgcaggtctggatgagaagggcaactcgctttggtacatggatcaggatattctggacgacgccggcaacgttgtcggcgtggaaaaagtcacgaccggcgatgctaccgaggccacgcagtacctgctggagaagagcgcgcttcccgatttcacgggcggcctgaacaccacgctgcgttggaagagcctcgacctgacgattatgaccaacttccagttcggcggctacggctacgattacgacttctcggcgttcagcagtgcgaatttcccgatgaaccgtctgaagaactatgccgacgcctggaatccggagaccgggaaaggttcggcgccgatctggaacacgaacgactcgaacatcaacgcttcgtcggatcgtttcctgatcagcaaaacctacttcaacctgcgcaacatcacgctgggctacaccttcccggcgaactggatgagcaagatcggcatcaagagcgttcgcgtgtacttcgcctgcgacaacgtcttcttcgcatcgaagcgcaagggctacgatccccgtacgagcatgggcggtcagggcgcgacggtcgctttgaacagcgtggacggtacgtattattcgccgatccgcaccacttcggtaggtctcaatattaacttctaagcagcgacattgatatgaaaaaaatactgatatttttaatgagcgcggcagttgcggtatcctgcagcgacgatatcttcgacgtggacccttcgggaaaagtctcttcggagacccgtgacgaggtggccaaggaggacccggacaaggtgcttcagggtatcgaggcgtccatttacacccactatgccacctattacaagaacgaccttcagtggctgaccggtttcaatggattcgaacttgcgttcggcatggccgggcaggacatgaccctgctgctgcaacacagcatgaacctttacatgtacatcaacgactactggcaggaggagtatacgccgactttcaacgtgtggaacatgttctacattccgatcgccacggccaatgagattctcgcgacggcgaccctcgacgcttccgccgagtcggagacgatgaaggcctaccgcgcccgtgcgctgacctcccgcgcgttcggctactaccacctgatcaacgtgtaccagtatccctactcggcggcgaacaaggaccttccgggcgtgcctctggccaccgaggagacccttggccagaatctgccgcgcgccacgatggagcaggtctacaaacgcattaccgacgacctggacgaagcgctgcgtattttcgaggagatcggatacgacgacaccggttcccggaccgatttcgacgccagcgtggccgccattctgcgcgcccgtgtcgcattggtcatggaggactgggggaaagccgtctcgttggccgacgatattctggccaaatacacgctcgtctccaaggagaactacaacaacggcttcaaccgtatcgagaacgttccgagtctgatcttcggcttcaagatgacggccgacaactgccagacatgggctacctggtgctcgcagatggacccttacatgagcggttatgcgggtatgtgggccgagcgtccgatccactcctacctctatgcgcgtctgaatccgaccgacgtgcgtcgcggctggtggctcaacaagacggacaatccggacccggacgctgcgacgagcggttatgcctgcctcctgccttccaacctgcccaatacgcttgcttcgggcgtgaaagcgcgttcggagtacgtctcggtcaagttccgcagttacaacggcgactggaacaataccgatctgatctatatgcgcgccgaagaggccgtcttcatcaaggctgaagccgaggcgcacagcaacatcgccgcggccaagaagacgctcaaggattacgtgacgacctaccgcgatccgggttatgacatcacggccgcttcgctcgacgatgtcgtcgaggagatcattcttcagaaacgtatcgagatgtggatggagggcgctctggagtggctcgaccgccggcgtctgaatatgccgattgatcgtcgggacgatgccgcgatgacggcggcaggcgttgcgaacaaccacatttacaaagccatgtgggagcagaacgaatccggcatgcggttccagctgccgcgttccgtcgtgattgccaacccggaaatcggcgaggcgaaccagaataaaacgaattaagcgtctctgtatcatgcctgtcaagtccgctgtccgtttgggcagcggacttttttctgatttccgggtcggtcgttttttgccgggccgggaaaaatttaccgacaaaattgcatgaggcatttgcagtattaaattttttgcttatctttgcaccacgataacagggaataccccgtttttcgcggatggtgccatagctcagttggtagagcaaaggactgaaaatccttgtgtccccggttcgattcctggtggtaccacaaagaaaatcaaccacttacagcaatgtaggtggttttctttttgtcttttccgtagcggttttacggtggtttaaggctttgagttaaaccgagagttaaaccaaaaatcactatggatgcaggtgttaacattctctgttacaaatcaaaaactcttgccaacggcgcacatccgctgatgattcgtgtctgtaaagacggaaagaagaaatacgttagtcttggtgtgtctgttttaccgcagttttgggattttacgaagaaccagccgaaaaagaattgtcccaacaaggcatatatcgaaaagattattgcggacaagagtagcgagtttgccgagcgcatcatcgaactgaaagcagagaagaaagaatttacggctacaacgctaaccgaacatctaacagacggcacccgtgcaaaacgcaccgttggcgaggtgtttttatcacaaatcgagaacttgaagcaaacggggcgaacgggctatgcgctttcgcacagagaggtctacaattccttgttgaaattcaacggacatctgaatatctacttttcagaaattgataccgtttggttgaaacgctatgaaacttggttgcggggacaaggtttttcagaaaatacaataggtcgccgattccgcactttacgggctgtctataatgtagccattgaggaaaagtgtgtgaaagcggattattacccgttcaaatcctacaaggtttccaaactgcaccaagcgacggcaaagcgagccataagtaaggcggacatcatgcggattatcgaataccgcagtaatgatttctacaagcaatttgcagtcgatttgtttgcgttcggttactttatgggcgggattaatttcgtggacatagcctacctcaaaaccgataatatcgtggatggacgactaatctacacccgacgcaaaacgcataagttgattaggctacctttacagctcaaagcgcaggagattatagagcgttaccgacaagatggtgcgctctttttgtttcctatactttctgcatttcataaaaccgagcaacagcaacgtaaccgcgttcacaaagtcatttccaaagtgaacgagcgactgaaagaggtagggaaagagttggaaatacctatcgacttaacgacctatgtttcgcggcatagtttcgccacagtcttaaaacgagagggtgtaagcacgtcgataatttgtgaatcattaggccatagttctgaaaaggttacccaaatctatttggatagtttcgagaactctcaaatcgacgcggcgatgcagaacttgttgtgactgccgttatcgagaaaagaggtgcccggcttcgccgtggcaccccttttctctcttgcttgcgtgagtaaagcgagaaaggttgcgattcttttttgtgctgacgcaacctctgtttttaccgttactcggcatttgcttcactctcggcggacttttccttaccgtcggtcagcggttctgcgaacatttggattttcgtgccgaggacgctctcgacgccgtactccatcactcggcgcattacggttttaccctcgaataccacgtgctcggccacgttttcgctctttaatccgttctttcggcagtactccccgaaatccattaggttggtcaatttgcgggcttcgttcttaatgtcgtaacttgcccgcttggggtcgccgtaggtgcgttctgcggcctcttttaggcacatccgctttgtttcggtgttctgcaaggccgacggcaggttgttgaacatccgccttgcgacggtcaatgccgaccaaatcggcgcactcggtgcacggcggcgcgaggtctgcaccgtctgttgttctttctgttcgacaacgggagcagttgtagcggttgcggcgtttgccgcgttaatttcattggcgtttacgccattttgcaaatgtgaatttgccataatcttaaatactccttttacagaggggcttaaattatgctgctcaccttgcccaagcgtttgcaggtcgtcgggtttatccctttcgacactacaaagatttgacttttctcaccccaaacacggggagtgaaataaagggtgtttttactctccctctgcaaattacagataaacagcggaataagttgcaggcatacgccttttgcaggacttaattattccttttaacgaatcgtcgctatacaaaaagctgtcattacgggtaaattcatagaggtaacagatacgcgaaatcagcaacagccgattcaacgaaacactcttgtcgggttgcttcgggcggttgtcacccaataaagtgttcagcatatcccgatacatctccacagtccgataaatccgaaacgacgtactcggataggtttcgtcgaaattgcccgtgtcaatcccgtaatactgaatcttcctgcctttgcattcccgttcataggtttcccgcagccagtccaaaatcccacgctttataacgggcagaacctcgactttctttctgttctttttaagggttatttcaatatcatcgtccgtgaaatcctcgcccaactctttgaacagattttgcaccgccttatccaaagatgcgggtttcgcaaggccgcagttcttaaacgaggtttcgacataatcgtaaataaagaccagcgcaaaccagaatttctcgacatccagccccaatcccttaaccgtagcggttatatcgtcgttagcgagataatccgacttggcaaagggcatcttaattttccccgtacagtagcgatattcgaattgcggcgtgcggattccatacgtctgttcatcgcatccgcaggcaatatcgacatactcgcgcaactcacggcgcatcgggtcgaaatcccaatgcacaatcttatcgttttcatccatcagtaaggattcatacatactcttacgaatggcattggcctccttttcattcataaaatagcgttttacacccaaatttacggctttttacgtgtacatcgcacttatttaccatgcaaaaaccgctattagcacttaaaacacgtgttcgaaaggaatttcagaacagccgcaccatgtaccgaaccgctaatagtaccaaattacatgacacgaaaggtgttttagaacaacgagctatgtaaaatacccgctaatactactttttgcacattaatttccccgtcgaacacactccgctaccccgtaaacagccaaataatgccatctaagacatagataaaaatgttcggattaattgctgtccgacctttgttcccaataaaaaaggtgctatctttataatacgaaaaaggagcagtcctaatgtcgagtccgtccataatcgggaggtgtttttcagcacctctttttcttgtttccgagtgtaatattttttgattccgaaatggactatctctttaataataacattacaagattaaaaataattacagattttatttcactaaaaacgaattacttatgcaaaactgaaccatcgacgcacccaaaggtgcaaacttacttcgggactttatgaccgaaattcccgtgaattgtctttttaacaagaaaaagacggggtgcggggctaccgaactggctatccgcaattccattcccacccttatcgctatgccttacgtggcattggtgaaaaacaagaccgtctgccgcaccgacgatatagaggtgttgggcgtgtacgaagacattaccgagtgggacatcacgcaattcgcccgtacccattcctccttaaagatagccacgacttacgattccctgccgcgcgtcgtttccgctttacagagcatcggcatagacccttacaaagagctgttcctgctggtggacgagtggcacgtactgttcaactcctattcgttccgacataatgccattaagaatttacttgcagaagccgctaaattcgataaggcaacatatatgacggcgacgcccatagaacgggaatacatgttggaggaactgcgacacctgccgacctgcgaaatcgactgacccgaccttacggaggttaaggtgcgttcgcggcagaccaacaaacccgataaatacatcgtgtcggagtgcgccaaagtcctgcgcgacgaattgccctacaacctgcatatcttcgtcaacagcgtggaatttatcgcaaaggtcatcgacacactcaaactcgctcccgaagccgttaaggtagtctgttccacgagcggggagagcaggcaggaaaaccagcgcaaattaggcaatgcctatcccatcggccagccctccgaccctgcgaagaagataaacttttacacctcgacctgcttcgaggggtgcgacatcttcgaccccgacggcgttacattcatcgtcagcgacggacgaaaggcgcacacgctgttggatatttccacgctcttcacgcagatatgcggacgcatccgagattcccgttacaaggcgcaaatcgtgcacgtctattctacgaccaaatacagcaagaccgtaacgctcgacgagtttgttgcggctacccagcggacgcttgcagacgccgaaagctatgccgccgagataaactcgttgagtgaagctacacgggttaaaaccttgtcgaagattccctacatcaacgaacaatatgtgcggatagtcgataaccgccttgtcgtggaaaagaacctcgccaatatggacatcgtgaatttcaaaatcagccgacatatttacgcaacctatgtaaaccttaccgacgaactgcaacgaaacggctacaaggtaacggtgcagacatacagcaaggtcgtggaacaccttgcggcgaacccctcggcgcggactacttttcaagagttgttcgacgaatactgccgactgaaaacaatgaccgagcaatttttcgtggtagaaagtcctgccgaactatgcgccgtgatagaacagcggcatccgctggtgaagcaggcttacgacgagttgggaacggccaaagtgcaggcgttgaaataccatgtcggcaacatccgccgcgagttggtaaagggactttcaatcggcgacgactataaaatcgtgaagatgataaacgccgcatttcagaagcagacagcaattcccaaaaacaaggccaaagaacgcttgcaggagatttacgacacgctgggtttgcaacgaaaagccaaagcgacagaccttgcgcaatgatacgagattaaggacgcaccgacacgaatagagggtaaaccgaccgcgtgtgtgacaattatcagggacagaatgattgcgaaatagggcatttattgggtagcgaatggaatcgtctactttcaatcaaactaattcagtctaaacaggaaagaattggctgacttttcaaaaatagctctattttttactcattttctacatcataacaaataaaactttacaatattttataagaaccaaaaaagatataactttgtgaatcatttgtagagttatataaaatggaagaaaaaagaacagtgacctcaatattggatagctcttttatgaaatgggttgcttttatttttgcgactattggagtggtgtggatattttatgataatttcgtaaaaaagaattgtgctaattttgagtacgaaatcttatctgaaacaagcatatttaataatcaagaggatatttcactattgcgcatttttattgatagtcttgatgttcaaaaaagccatgcaaatattagtttctttacgattaaaataacgaataatggagataagcacatttccacagaatcatatgatagtggtaattttggactgaatctccacaatgggtttgtaattgaaccgcctgttcttatttctgcatcaacagaatatttacaacgaaagattaatcccgatttactaaagttaagagatagtgcatttattgaaattcctaggacttctttagatatagatgactattatataatcaaatttgggatgcttcatcataatgactcaattccaggctttgatagtgaaggaaaaattgtaggacagaaaaagataaatataaaaaatattactaaaattgcccctagtttatctcatcaagctgtttcaggtagatggaatgtgcaaattattagattcctattctatggtttattgttttttgtattgtttatttgtctcctatggattttcgtagaagcgattcctaattataaagccaataaaaaaagagccacagttctaaaagacattttaggctcaacccaaattgattttatagttagggaagattatattgcacatggagctgagcgaatattacaaatacataacacattgaaatataacgataaagaactaacaaaaaaatacaataaatctttaagttacataacatcgaaaaattctgtagcgctaaacaacaaaggccagcgaaagtggcacgagctacggatgtctgaattcaataatttaatcgataagaaatatattatccaacaacctgataatacatttattgttgacaaacgacgtaaagcctcggttgattatttatataatttattacagaaaaacggactattacaaggctttccaggtacagatattacgacactagttaattgtcagtaaaataattagattaaagtgaagaggggttttaagctcctcttcacttatttaagccaacactccctatttttcacccctcccccttttcagatggaaacccgaattttcatccctcccatttaataggaagccacctaaaacagaccaccccctatttatgcccgaaaccatataacagcataaaattatcggaattatatagaatcggaaagctattcttacatggagatatgccgccctgtttagttgattatgaatggagttatctttttacaagtaatggggaataactctaaactttacagaccatgaaaacattaaatgaaagggcgacagatattctgcaagccttgttagccgtgcgggcttacagaatcgaccacggaaacggagtttacacacgcttacgtgccgcaatgattgggcgcaatggaaagtacaaccttatttcgctggtagaatactacgaagctaaaggtaaacttgcgcagaatacagaaatgaattttgcatttgacacaagtacaaaacagtttatcccgtactattactgcaacaaaactctccgcattgaatcgcatagtgcgtacccgacagaaaacggaatggagaattgcgccgaggaacgacaggctgaccacacaaattttgcaaaccgatggctaatacgcatgaactcgcaacaaccgattatatgaatgcgcaacgaatagtacagaattgtgttttgaaaaatcaaagcacggttatcgaggaaatgatacgggcaaaccttatttccgaagaatatctttatccgttcgcggatgatgtcatggaatggtggctgattgattcttggctggcagaacgactgaaagcgcaaggcgaggttatcatcgaggaatacggttgctactggtggggcagacaatccagcgggcaggcgatttacatggacggcgtaatacaagaaatctgcgggaacaattaacccaacttacaactaacaaagtttcgattccatagcgtaatctattggatagaaactttgttttcaagaactttgcaacaaaatttaacggcaacaccccaacggagagcattgtaattcaaaaacattttctaactttgcattgtcaccgaataggtggcagacatattgattagtgaaagtgtttcgctatattcctcgtcagaaatctggaaaatttcacgtaaacaggaataagcattacaaacgctcttcaccttgtgtagattatatcctttcgatatatctgcccaagtgtggggtgttgcttatttgtttacgggcattccagagcctctgacgaaataggtgaacaactccacactttctttttgcatataacccaccgcagcaggagttgatacggtaagatttgaaacacttgtttaacttaaataaatcttactatgaaaaaattatttttatttgtgcttactgcaatgatgatttgcggatgctccaagaacgaaaaccctgcacctcctgaagaggatatattttccgtcgatataacatcgctggaatttagcgggcggggaggcacacaatacatttcctttgaaagcacccaagattggacactttcgggtggcgcttcttggtgtgaaccgtcgcagaaaagcggaagcggcacagaccgatatttttctgtcgatttttctgcaacaagcaatacgacaactgataaccgctcaactgcattcacgctcaaaagcggagaacaatcggtagaaatacaaataacacagggatttgttccgaccgtcattgtgtccgaagcgggaacattacaacaaatcttaacagaacaaaatctattggaaacgacggaattgaaaattaacggcaagcccgatgaaacggatttcaaatttctcaaatccgtgctgacattgaactatttggatatttcggacgtaaatttggaagagttgcctgaaagagcctttgcaaattcccttatttcccatgttatattaccgcgttctttgaaagtaatcggcaatgaaatgttctatatggcagaaacgagaaccgtacaaatgtttgacgaagtagttgccataggcgacaaggcattttatatgagcgaaattcattcggattttcatttttcatccaaattacaaactatcggtaaagaggcgttttatcattgttcgggcttatattctctaaaatttcctgcatcacttgaaactattggggaaagtgcatttgcgaatttgacatattccgtcacgagttacccatctcttgattacatattttttgaaaaagggtcgaaattgaaaacggtcggagatgaagctttttatcgcgctttagaccgtgatgggattatttatatgcaacattgtactcaagttgaaacgcttggatacaatacattcaaagaagatattgcttctgcattctattttgggacaaaaacaccgccccaaggaggattcccctttaaaaaaggcgactacgtcaatgcttggactgttaaaatatatgtcccgaaattatatgtagatgcatatcagaaactttggagcaattattcttgggacgtgcaaggtagctttatggcgttagaagataatatgcccgaagacaaatgatactgctatgaagcaaaataggataaataaagcccaatggcgagaattgattgcaaattacatttcttactgcaacaacagaggaaatttaggattgttggtcaaaacggataatctacgacatgtttcaaatgcaatttgggatgagtggagccgcattatatcaacaaattgcaatcgcctttcccaatcggccgattttaacgaattgtacgaacgcatagaggatttgaaaattcggggaataggagcacaatccatgattgaaacagcccgacaaatcgcttataaatacgatattccattggatgattcctgctggagagtggtagtgcgaaaatcccctattatcaaattacttggtgttcctgcaagagatattaaaagttactttgcccgattatcttctgatttcggacaattaacctcacagcaaaaaatagattttattattgcctaccaagataaaattaggcgtctgctaaagaaataagatacaccacctatcgagtgacagactttgtgaaaaggttaatctataagacccttttgcagagtttgtcactctcttattttgtttattccactaataatcttatctttataaagataaataacgattaaattttagctaaaatgaacagatacaaacaaccgaaaacagaatgaaagaccgacgcatgagaggataaacagataatccaaaaggcggttaaatggagccaagcagagggaatagtcctgcttgtaggaaaacccaaagacgaaatatttcccgaaacatttatctacttgtttgcccctaatatggcagacataacaaagcccgtcgaaattatccttacaaagaaccgacaatacatattcggatgaaaatgcgagctcgaagatatggacgggataatcggcacaatgacggctaacgaggcacaaatcgagggaacgggcgaaaaggtgaatttgttcgactaccacgtgaaagccgatacaatcctattccaatacaccacacccgacggacgggacgagatggtgaaattcccgttagctggattctgcgaaaactatctgatgcaatttgcaaaataattcggtggagttgaattgcatcgtatctataaaggttaaggagaaagggccgaaaaaatgcggcgttttcctttgactacaataatactaattcattcaattactaataatctcgattaaatcaagagttaaaccgtcagttaaaccgcgacgaaaagacagaaacaaggggcgaacgggctatgcgtaaatcactgaatagcatctatattcagacgggatggtgccatagctcagttggtagagcaaaggactgaaaatccttgtgtccccggttcgattcctggtggtaccacttaaaaatcagagagttgcagaaatgtgactctctttctttttggtgtaaaacgggcgaaaagcagggtttgttttacccagtgttttacccatgagcacaactatcgaggtggtatgcttcaaatacaagcctctcaaaaacaatgaatttcctttaagaatacgcattacaaaagaccgcaagaccaagtatatcagccttggagtgtctgttgcacctcagtattgggattttgatagaaatcagcccacattggattgccctgacagggaatatttggagaaactgattgccaataaattacgaactatattaaaaaatgcggaaaaagagtaataatatcggagaatggttcctactaaggtctgttggagacgaatccgtcgatatactctttatcgtgcgcgacaacagcaaaagcctgcctgatgagcttgtttgcgac

SEQ ID NO: 40 - DNA, 207109 bp, Alistipes shahii
  source 1..207109: mol_type = genomic DNA
ggagatacgcgccgtgggagaccgcatcaccgtgacggtaaacggcgaggtgattctcgacggagacatccggcaggcctgccaaggccacaacgtggcccccgacggcgggaaaaacaacccctacaccgtggaccacaagaaccatcccggactcttcaacgcctcgggacacatcggactgctcggacacggagccggaatcaagttccgaaacatacgaatcaaggaactgcccgccccgaaaacgaaataacaaggccgcaggaaaacccgccgccgaacggcgggttttcccggcccggcagcggaaattcacaaattaacgctatatttgttccatagaatatttatctacattatgtagctttcatgtctttgtaacgggaactttgacaatttgaaatgaaatacaaggaaaatggccttcagagttgacaaattattacctaaaatttctcattgtattgtttgtcggatatttatgtttaattatattttggatgcaaaagtttggaacccttttatcttaataaaataaatccttcaatttctaagttactattgcaatagcttgttgattcagccattttttcttcgatcgaataaaatttgccatcccgaaaatttttcatatcttgcaagaggttatttgacatgtggtattttcgtgcaattaactgaaaataaatcgttaccttctcgttacctattctccattaaagcaatgtaacaactcgataaatcaagtcgttatattgctttaatcccgcaccgatgattcggtccgccgcttttttcttataggctggccgtgtttttgcacgtgccggtcgagcctcaccgccggattcctccccgcgaaagcacctcctcgaagtaggcgatggtttttaggagaccgtcccgcagctggattttcggctcccagccgccgagcatgttgcgggcgagcgagatgtcgggctgccgctgctgggggtcgtcggcgggcaggggcaggtggacgatcttcgatttcgaacccgtcagggagatcacctcgcgggccagttcggcgatggtgaattcgttcgggttgccgatgttcaccggactggtgaagtcgtcgggcgtgtcgttcatcatgcgcaccatgccttcgatcaggtcgtcgatgtactggaacgaacggctctgcccgccgtcgccgtagatcgtgatattgtcgccccgcagcgcctggacgatgaaattcgagaccacgcggccgtcgttgatgtccattttcggaccgtaggtgttgaatatgcggataatcttcacgggaatgccgtgttcgcggtagctcataaagagcgactcggcgcagcgtttgccctcgtcgtagcacgagcggatgcccagcgggttgacgtggccccagtaatcctcgcgctgggggtggatcagcgggtcgccgtagacctccgaggtcgaggcctggaggattttcgcccggttgtatttggccatgcccaacatgttgatcgagccgattaccgacgtctgggtggttttgatcgggtcgtgctggtagtagatcggcgaagcggggcaggcgaggttgtagatctcctcgatctcggccatgtagggatagacgatgtcgtggcggatgacctcgaaattggggtgcgacaacaagtgtcggatgttgcttttgtgaccggtgaaatagttgtcgatgcagatgatgtcgttaccttccgcgagcagcctttcgcacagatgggagccgatcgtatcgcagggctgcattcccgaaggggtgatgtgcttcagctgcttcgccagcgagaacggcgtcatgctgcccgcgccgcccgattcgttgcagacgtggagaccccgtgcgatcgactaccgggtgatgtgcgacagcctgaacagggtgggcggcatgctcaaccgctacgacatccggcgcaacatcgacctgatccgttcgctttatccccaggtggagaacatcgctctggtgaccgacaatacctacggcggcatttcgttgcaggcgctcgtgcgcgcggagtgggagaactaccccgacctgaatctcgtgctggtggacagccgcgagggggaggagacggcgttccggacctatgcgacgctgccgccccgttcggccgtgatgctcggcacgtggcgcgtaggcagcgacggcgaatacttcatgcagcggtcgctgaacgatctggtgcagaacaacccccgcgttccggtcttctcggtgaccggtacgggcatcggcgacacggcgatcggcggttacgtgcccgaatacgagaacggcgcggaggtcattgcgaaccagatccggaaatattacgacacggacgacatcgaagacgctcatttccatacgagcaaaagtctctatctgttcgattcgcgcaagctcaaggagtggaaaatcgccgaatacgccctgcccaagggcagcgtcatcgaggatacgatggcggccaagctgtcgaaatactcccactacatcgaactgctggtggcgggcatcctgctgctggtgctgctgctcttcgtgacgtggctgctgttgcgcatgcggcggctcaagctcacgcttgaggagcgcgagggccagctggtcgtcgcccgggagaaggccgaggagtcggacatgctcaagtcggcgttcctggccaacatgagccacgaaatccgcacgccgctcaacgccatcgtgggcttctcttcgctgatgcagagcgaggagctttcgcaggaggagcgcgccgagtactgcgccatcgtggtcagcaactccgagatgctgctcacgctgctgaacgacatcctcgacatttcgtcgctcgagtgcggcaagatcaggttcaactacgcttcggaggacatcgtgcagatttgccagcacgtgatgatgaccacggcccatacgcggcagagaggggttgaggggcgtttcgcgtgtcccgtcggatcgttcatgctcaccaccgacgcccaccgtctttcgcaaatcctgatcaacctgctgaccaacgccggcaagttcacctccgagggcagcattacgctaggggtggagatcgacgaggagcggggcgaggtgcttttctcggtggccgacaccggaccgggcattccgcccgacaagcaggatctggttttcaaccgcttcgagaagctcgacggcaacaagaagaagggcacggggctgggccttgccatctgccgccagatcgccatgatcgtcgggggccgcatctgggtcgattccgcttacacgggcggcgcgcgtttcgtcttcgcgcatcccatcggtatcgaccccggtggagagaaccgcgagggggggggggatttctaccctctgaacagcgtaagtccctctttgtgaacgatgccggtcaactggtccccgaagggaaataagacgcggagaaaggctccttcgcgccggatcacctctttttcgtcccccatttgggctttatgccgatgaagaattcggcgttcatgcgcggcatgggccgggagagcaccgagaggtactcctcgttgaacaggttgttgaccgtgcctttgagcgtcaggtccgcccaccggagcgagagacccttttcgagcgagaggttgctcatcagatagggcgtaaggcgtccggtgagcgtgatgtcgttgctcgacatggtgtagcgttcgctgtaatagcagaactgatagagcaggccccagctgcgccaggagagccttccggtcgccgtggccgaatattccggttcgtagggcagctgtttgccgaccgaccggtcggccggggacatcggctccccctcgttgatcgacggcgcccatgagaaggtgccgttcaggttgattttcagttctctggtgagcgctgcggccaggtcggcccggatctccacgccgtaggcgtggacctttttgatgttcaccggcgagaaaaatccctttgccgtcggcagccacagaatccagtcgtcgatgtgctggtcgtaccacgacgccgaccccgacagcgtgtacgcgccctcctttcccacggcgaacgacagtccggcttcgtaagcgacgccctgttcgctgttcaggccggggttgccgcccggcaggaagtagaggtcgttgagcgtcgggaagcggtagttgcgcgagacggaggccttcgccacgacgttgccgcgcctggaaagcaggcagtcggcgaagaaggcagggatgaccggcgaccaggaggttccgtacatggcttcgcgcacgacgatcgacaagcccagccgctccgtggggcgccacttggccgacagggagccgtcgagttcgatgcgtcccttgtcatagccgacgacggccttgtcgccctgctggcggatgatgttcttgtcggcgctttcgacgaagtgctggtgtgccgacagtccggccgtgaagaaccatttgccgccgacggaatactccccgtcggcctgcccgtagagggtgttgatcctgctccgcgaacgggtcatggcctccaggatgccgttgcccttgtcgcgccggtagtcgtaggccgtccacgaatgcacgtatccggctttcgccgccgccttccagttccggcggtagtggtcccacgagaggacgctgcgcagggtgtgttcgcgctggcggttttcgaactgcgtgtcgtcggcgtagtcggtcgtcagcaggggcagttcccggttggaattgatgtaccaggcgttcagcccgaagcggtcgcctttcccggtgttgtagtagacctcctgcaacacgtgcacgtcgtcgaacgcgccgctcttgttgcgttcggtgggatagtacgacccgacgatgttcatctcgtcgtcgtagatgttctccttcttgtcgcggttgcggtacttgtagtcgttggccgaggactggtagacggcgcgggttgatacctgccagcgctcgtcgccccatgtcaggcgcaggaattcgtcgaaagtacggaacatgccgatgccctggatatattgcagcccgaatccgtcggccgccgccggcgcagtcgagagcttcaccagtccgcccagtccgccgcccgtctcgctgaccgacgaggttccgtggagcagcgaggcgtcgtcgatgaaataggaggggatcatcgaaaagtcggtcatgcccagcatcgggttgttgatgcgcatgccgttccacgtcacctgcgtatgcgacggacccgtgccgcggaacgataccgtggagagggtcgcgcggccgtactgcttgacgaaaaccggtgtgttgaacgtcagcgcgtcggccatcgagagggcgatgttctccttgaggatcgccgagtcgagtttcgtctcctcgacgccgatgcttttcatcggacgccggccccagaccggaacctcccggatggcgatggcgcctttcccgcgccactcccccgcgccggcgttctgcggggtttccggcacgtcggacggcgccggctcgccctgcgcccgcagcagcgccggaaacagcagcatccaaagaaacaaggcggttgttttcatgctctccggttatttccagcaaaacgctccgggcgcgacgcccacgtgaaattcgtcgacaggctcgcccttggccgtatagcggtagacgactccctgctgctggtagtcgacggcgtcggcaacgtacacgtcgccgttggccggatcgaccgtcagtccgtaatatttggtctccttgtattcgaggaacgggcgcaccggaagctgctccccggcgacgggcatgcgccagacgtcccggtcgatccagtagagcgtgtcgcgcgtgccgttgagctgcatctccgacggggagtcccccttccggaaccggaactgcttctccacggagaacgtttcggcgtcgatgcggtacagcgacggggcttcatatccgtaggggctgccctcgtagccgccgtcggtgacggtccacagcttgttgttccggtccatcgccagcgacgcgggctggatgccgacggtcagctgaccgacgacccggtcggtctcggtgtcgattttgaggatacggttctggtaggaccagcagttcacgaagacgtatttgccgtactgcaccatctgctccgtggagccggattccgccgtcatgtccgggcactcgatatatcccgtgatttcgtagcgtttggggttgacgatgaagatgcggttgtcccagatctgcgtgacgtaggccttttcgtccgaaacgaaatggatgtaccgcggcgaggtgaggttggtgatgcgtcccacctcgcggaaggtgtcggggtcgacggcgaaaacgacatgcgaattgtttaccgcgatccatcccacgccgttgtgcagggtcatcgactgcgccacgtcgcccagcttgaaggcgttggcccggtggaaaacttcgttttcgacggttttcgtttccgggtcgtaatacgacagcgtggcgtttccgtactggaacatgccctcgttgacgatgaacagcccccgttccgtcgccgagaaatcctccgtgcggccgtagtcccacttcatgcagccgccgagggcggagaggcataaagccgcgggcagaatctgtcgtaagaatcgtttcatgcgttgcggtcgggaatggggttatcggtcgaggttctcgtcgacggccattccggcgacttcggtcgagagttcgcccagtcctccggcgctgccgttgatggcgctctgcaccttgatgaaatcaatgtagcgcaatccggcgggctgcccgtcgggcgtcatggcgttgctgatcttgaaccaggtcttgccggttttggacgaagattccagattgtcgctgcccgcgttgtcgacgtacccccattcgaacgagttgttcgaccagtctccgcctggggtctgcgtggtgttctgccgcaggcccgtgccgtaataggtatgggactcctcttcgagccacaggggatagtagtagtcctgcgcatggaactgtcccagataggctacctgcccgctccggcccagattgtcggtccatttcaccccctggcgaggcccggcgggtctgtaataggtcaccgcatactcctggacggtccattcgccgcccgtttcgctgccccggagttcgtaccattcgtcgtcgggcttgccgttgccgttgacatcctgcatcacccacacgacgcccggctcgttgcttccttcgaactggttgccggggatcgaaaagtcgtatttgcccttgttctccacgctgtggtcgaaggcgaggatcacgtagccgccgaagttgccgagcgagacgaactcacccttttttagccggttctcggcgtagagacgggcctcttcgaagctcttctggccggtgtatccggccatgcccgtttcgttgacgaactgtccgggcgcgggcaggaattcgagcacccggttcgacgcgggctgtcccgtcgtcgtgatgacgcgctccgattcgcgttcgtagcaggtcacccggagcgttttctcggtgattcgcttcgacgatgcgcgcgtgatgtggcgcgagaggggtgcggccgggctttcgtccgtgtccgtcacccggaaggtgacctcgtattcgccctccttctccggcgtgaaggcgaacatgcgttgggttgcgtcctcctgcaagacgccgttcacgtaccatgcatattccggcccgacggcgtcgctcacctgcggccgcaggaacagcgtccgcccgagcgatacgctcttcaccagcgggtcggccaggtaggaggaggggatgaacgcgatgcggaccggaatgacgtccacgacgtgcacggcaaccgttttctcggccgtgccgtcctcgttggtcaccgtcagccgcagggagcagtctcccggttgggtgggcatgaagatgtagtccttttcggtggagaccggtacggacgagtcgtccagataccattcgtaacgggcgttttcgccgttctgcacctccggtgcgaacgtgtattcccgtcccgtgagcacgtatagccccgtcggcggcacgatgagcgagatgacggggggagcgagccggttcacgtcgatgcgcgcctccttctcgtcgtatcccgcccggttttcgacccgcagggtcacatagacgcggccttcctcgttgaacacgtattcgaacacgcgcgccgtggaaacgacctcgtcgtcgatcgtccagctgtaagcggcctctccctcgttttccacggtcggcgtgatcgtcaccgcgcggccgatcttggccgcgtagacgccggtctcgctgtcgagggtgattcggggtttgctgtccggcagcgtaatctctccgtccttgttgcaggctgcggccgccagcgctaccgagagcagcgccggtatcgccgtccgtccggcatgactgaaaaaacagctcatatcctcttcgtttaaatcgttcaaccaatctttgcggatgttccggagatccgcattcgtgccgggcgcacggcatgcgtccggccggaatttcgcagtagcctgattttacattcggggatatgccggaaatcgtttttcctgccgatcacgatccatttccccctggattgtaaaaccattgcagcggcaggtcttctgactcgttccggtcccgacgccttcccggtcgcgtgaaaaccagtggcaagagattgtcggggtctgatgtgccgcttcggcggcaggaacttacagcagagggaactgttgccgattttcacggcattcccttttaatcgcccggggccgggggcctcgttcggcgaaccgttgcgcagcaaaggtatggaaaaaagatgaaaaagaagatgcgccggccgaattttatgccggcggcctgccgaaggtcccgccgcccggggttcatttccggtcgtttccggggacggaacagctgcgccggccgggaggcggacgcctgcgcgcagttgctctctcctgacgcctgaaaacgaaaaagtcttacatgtcgttgacacataagactttttgcagtggacgacgtaatccgttccttctctctcacgcctcctggagctgaatccgagatttgaactcgggaccccttcattacgagtgaagtgctctaccgctgagctaattcagcctttcgggaacaccgaggttccctttgggactgcaaatatctgaaaaatatttttttctcgcaacaattttgcgaaaattctcgcttttcttgctatattcgcgctaaaactgacccgaaactgttttacgatgattacttttctggtgtgcctggcgttgctggtgaccgcatatttcacgtatggacgctatctggaacggctcgtcggcatcgacccggcggcccggacgccttgcagccgcctttacgacggcgtggattacgtgcccctgccgaggtggcgcattttcctgatccaactgctcaacattgcggggctcggcccgattttcggcgccgtgctcggtgcggcctacgggccggtggcgtttctgtggatcaccttcggcggcatcttcatgggtgcggcgcatgacttcatcgccggggtcatctcgctgcgccacgacggcgcgagtcttcccgagacggccggggtctacctcggcggcggcatgaagatcgtcatgcggctcttttccgccgggctgatgatcctcgtcggtgcggtgttcctctcgcagcccgcatcgctcgtcgcggcccgcctcgacgtcccgtcactcgaaggcatcgctttcggcggattctcgtggctgctgctgatcgtgctgggcgtgattctcgtctactacatcgccgccacgctgctgcctgtcgacaagatcatcggccgcatctacccggtcttcggcttcgcgctgctgttcatggccgtcggcatcctcgtcgtgctgcttttcggcggcgaatacaccattccggaattcacctccttcgaaaactgcatcgccgatgcgaaggccttcccgatcgtcccgatgctcttcacgaccattgcctgcggcgccatctcgggcttccacgccacgcagtcgccgctgatggcccgctgcatgcgcaacgaacgcgagagccgctcggtcttctacggcgcgatgatctccgagtcgatcatcgccctcgtctgggccgccattgccatggccttctggggcgacgtcgcggggctgaacggcgccatcgccgaatacggcggccaggcggccgtgatgatcgacgtgatcgccaacaagacgctgggtccggcgctggccgtcttcgtgatcttcggcgtggtggcctgcgccatcacctcgggcgacacggacacggccttccgctccgcgcggctgatcgtcgccgacttcatgggcgtcgagcagcgcacgctgcgcaaacgcatctatatctgtattccgctcttcgcgttgggacttctgatcatcttcggactgccgtttcagaccatgtggagctatttcgcgtggatgaaccagaccctcgcggcggtgacgctctggatgatcgtcgcctacctccgccaccgggggcgcgccgtgtgggtggggctgattccggctctcgttatgacgtatgtctgcgccagctatatcttcgtttcgccgctgatgctgggcatgcagaaccgtacggcggcttacctgctgggcgggggcgtgacgctcgcggtccttgtcgccatgattttcaaactcaaagacaacgatgcaaaaggcatatcttgaacctacgcccgaccagactttcgaggtggtcggcgaaggaccctgtaatttcgtgaaagtcctcgcccggtcccgcgagatgcaggccgccggcgatatagaaggagcctgcaacgagcgttttcaggccttccagcgtcttgcggagctgattcccgaggacgaggagatcaatctcgaatggagccaccgcaattcgcgcgcggcgctcgaactgatcttcgcctcggccatcgaccacttcctgatcaacaatttcgaaatgtcggcggcgctcttggaaatgctgctggaactcgaccccgaggaccatctggaagggagcgaactgctggccttcgactacctggccttggacgagcaggagctgttcgacgaggtgatcaacgacgtgtcggacaagcatccggggcgtgaggtgctgctgctgtggtcggctttccgccgtgacggacgattgcccgaaggggagttgcagcgattccggacgcattttgcgcccttcttcgccgaatttaccgccgacgagcatccggccgacgaagcgtatctgcgcgacatcgggagcgaacgaccctcgcccgccgcgcaggcccgcgaactgtggctccagaccgaaaatctctgggtgttctggcccggcttcatcgacgccctgcgcgccgcccgctgacgggcgcccgcgtgccggagggcgaagcccctgtcccgcaaaacagaaccgcagcccggatttccggactgcggttttttgtcgtaccctcctccctgcggccggggacctacgctttctctccgttcatcagcttgttgaagcaatggcggcagatcggttcatagctgtcctgtgcgcccagcatcacctgcttttcgtcgctcgtgaggcggtgcgaatggtgggcgaggttgccgcagcggacgcagatggcgtgaaccttggtgacgtactccgccgttgccatcagcgcgggcatcgggccgaacggctttccggtgtagtccatgtccagacccgcgacgatcacgcgcacgccgttgttggccagccggcggcacacgtcgacgatgctttcgtcgaagaactgcgcctcgtcgatgcccaccacgtcgacgtcggcggtcatcagcaggatgttctgcggcgactcgacgggggtggagcggatggcgttcgcgtcgtgcgacacgacctcctcctcggaatagcgcacgtcgatccggggtttgaaaatctcgacccgctggtgggcgaatttggctcgtttcaggcggcggatcagctcctcggtcttacccgagaacatcgaaccgcatacgacttcgatccagcccttgcggctggcattttctaaaaacataagtgtaaataactctttttttgtttatcaggttcgccgcagctccgaaggagtcggtttccgcggcttatgtttcggcgcagataattcccctgcctccccctcctccccttgaaaaggggtgactttggcccgagggtgtcctgtccgggagcctccgcagggctgtcttgtggggccggcatacaaagataaccggttttttcttttctgcaaagcgaaaccggggctatgacgccccggcggttcccgaaaaacgatccggccctcccgcgaggggaaggccggatgcggaacgtgccgtgccgggcggatcgtcagttcgatgcggggaacttgtaggccacggccacgggtttttcgcagatgccgacatactccttcaccttttccatcgtcttcagactgtaaacgtagaggctgccgggcttgcggccggtcgccgtcgggttgtaggtggcgatcagcagctggtcgtcgtcgaccaccgcggaagaggtcgacggtacggcgttcgtgcagatgtccatgatctgttcgccgtcgggcagcgtgatgtcgggcttggccccttcggcgggaacgaccgggtcgacgcctgtcatcgcccagtgatagatcttgttgtcgtaatcgtagtaggcgtttccgttgagcttcgtcgtgacgatccgggtgttcgcattcatcagcatcggctgcacctcgtcgtaggtcttgatttcggtcggactcgaaagcgatgaactggtgctgatgattttgacggttttcggcgccccttcgatcgtacgggcgatgcagtagtatttggaagcgtcgtactgtcccgccccgatgcggcccgctgccatgttgatgaattcatacccgtcgggtgcggcgtatcccgcgattctcgaattggggaatccggtgattccggcctcggagaacatgaggatgtcgcgcactccggcggttttcgaggcgaacagtccctgccggccgtatcgtgcggggaagggcgtttcccgcacgatgagcatgtcggtcgagaattcgtagcggtaggccctctcgtcgtcgccgatcagataggcccagtgagcggttcccgacgttctttcgcccagaatctctccggtgcggactccgtattcgtccatccccttcatgcgataggtgacgctcagcgtcacggggtcgaggcggtagatcgagccttcgtcgtcgcccgaggagatcagaattcccgaagcgtatcccggcgaggagaatacgtagacgtcgcgcaggctgcggaagtcgtattccgggttgatcgtcagcagattgtcccagatctcctgggcgccttcggcctcctcctgcggagagcgtttcttgacgaaggcgagcgatccggcgccctcgtcgtcgttgcagaggatcagaaaaccttcgtcgaacccggcctgcacgcgcaggtcgtagtaatggaatccgatgctttcgccgttgtcgatccgcaggcgcagcacgtagctgccggccttgtcgaaggcgtagtcgagcgtcggcgaactggaaatgaacgtcgtgtcgaccatgccggggaagtctcccgcaggttttccgtaggaccattcgtagacgaggtcctgcccgctttcgctctccacgcggagtttgtcgaggtggagcgtttcggtagccttggcgtagatggtccggtccagaccgctcaccgtgatcggggccagctcccggtactcctctttgtcgagtccgtagcaggaggccagtgcgattccgcagcagagcggcaacagatatttcgcaagttgtttcatggcgctttcggttaatagttatttgccgggtctctccagccgcctgtcgttacgttgacgcttccggtcgtataatactccaggtcggggtaattggtcgaatagtagtcgaacagcgggcagagcacgtagcggagccaggccatcttgtgggggttctgccggttgaccatgaatcccatgctcatgcgcagctgctgtccgttgagtcccgtgtagtaatcgttgtcgatgttctcgccgtactgttcgaccatcgacgcgtagagcgtcgggttgctctccgcgattccgtggtagagttccagcagtttccggtatttgtcctgccggaattcgcccgtgtactgataccactgctgggtggcggagtagtaccaccagtaggggcaggcggcggttccgtccgagatcaggaaccggtagacgttccggggcacgccttcgaattcttcgttctgggcgatctggagcaccagcgacgcggttttcgtcataatcttctccgtgcgcttcagcgtcacgtcgatctgcccttccacggagccggccgggacgatgagcctgtcgatcgtgtagtcttcgttctcgacggcgtcgatcagctcgcgctgtacgccgcccgtggtgtaattcgaggtggtgtcgtgaatggcccttacctcgaacgtccggtcgcggtctgccggcattcccagcagggtcacggttacggtcttcttgacctctttcaccgattcgtcgagcagggcgaacgaaaagtcggtcgagagatactggtccagactcggatagttctcgtatttgaaatagagtttgtccttctgcgacgtgtcgtacatcagccacgtgtcggaacaggaggcgaatgccgcgacggttccggtcaggacggctattttgaaaatgaggtttttcataagtcttgcgttattgtctgtaattgtcctctacgctctgcgggatgggcatcgtgtaggtcgcgtcgtcggttcccgcgaaattgcctcccggtatcgcgatgtccagctgcaatcgtttcatgttgaagaaatcctcgccgtcggcgaaaaactccttccggcgttcgttgatgatgttgttttcggtgattttgcccgtttcgcgctcggcgaaaggcgtcaggtcgcgtgacttcaccacgtagtcgaggtattccgtcgccttgtccgggtccttcgtgaggttggcttcggccacgatgtagtacatttcgggaatccggatcagactcggtccggggattgatttgccgctgtacgtggggttgctctctccctgggcgtacatcttgttgtagtgcttgatgcaccacgaattgcccgtgtcgaaccaggtcgagtaacgcttgtccgtgccggccaggtcggtggagtagatttcggaatactggctggagagcgcaagggttccgccctggtagatgtgattccggtagaagttgtaggtgtactgcgtcgagtagagcccgaagacggtctcctgcatgttgagcgtgccggtctccacggcgttccaggcctcggcggtcgtcatcagcgggaatttgccgctgtcgatcaccttctcggcgtaatcctcggccaggtccagtttgcccatcgtccagtaggcgcgggccagcagcgcctgtaccgcgtagaggttcaagtgcgtgatgcggcagctcgtgaagccgtcggaggcgttgtcgcgggtcgccgtcaccagttcctcgtccgccgcgaggtatttctccgcctcggtcaggtccgcgacgatcagttcgaacaccttgtccagcgaactgtacggggtgacttcgatgccgtatgtggtcacgtagggaatggccttggctttggcggcggcgtcgcccgatgcgaacggcacggcgaagatgcgggccatttcgaaatggaggtaggcgcgcagcgccagcagttcgcctttgtagagccggatgtggcggaattcgtcgtcggatttgggcaggacgtgcatcagcgccttgttgacgtatccgatggccttgtatccgttgatccagaggttttcggctaccgtgatggcgttttcgtgctcccacaggcgctgtacgacgtaggccaggttgtcgctctggctgatggtgaagttgccggtcatcagttccggataggcgaacgtgagcgcgtaggcgaagaggttcttgttggttcccatctcggtatagatgccgtagatggcgtcttcgcagccttcggccgtcgagaaaagttccttgtcggtcacttccgatttgggattgacgtcgagatacgcttcgcagctgcccagcagcagcggcagagccagcaggatgtagctgtattttttcattcgtttcatggtctcggcaatattagaacgtgggacggaatgtcaggttgatggtgcggcagtaggggtagctcgtaccgcgttcgtacttgacggtcgagaagcgtacgatgtccgatacgccgacacctacggccagacgcttgaatccgagccgtttgaggaatttcggctggaactcgtaggtgagcgtcgcgctcgaaagccacagttcgttgagccgctccacgaaacgctccgagttgtgcggggtcgtcgaacgccgctccttgatggcgaggtagcgcgacaggtcgcccgggttcttccagcggtccgtaaaggcgcgttcgtcgacgttgtagcgcgggtcgatgtcttccaccttctcccagagggttttgttgtaggtgtcgccgccgaaggtgtagctgaagacgaagttcagcgaccatcccttgtaacgcagcgtgttgagccacgtgccttgcagtttgggctgcgtgttgcccacgaccacctcgtcctcggcgtcgtacttgaaggtgtattcgccgtttttgttgatgaagatttcctgtcccgtggcggggtcgataccggccgaacgcacggcgtagatgtcgtactgcgagccgccttcccggaagcgcagtttcagcgggttgtcctcttcgagctgataggcggtgttcttcagcttgtcgctgatctgcttgatgcggtccttgacgtgcgaaccgttgatgacgctcgtccacgcccagttcttgttgcggatcacctgccccgccaccgagaagtcgtaacctacgttctggttctcgccgaagttcacgacgatgtcctctgaaccggtcgacgccgggaggggaatcgtcatcagctggtccttggtggtgttgcggaagtagtcgaagctcatcaccagccgttccttgaagagcgtgaggttgatgccgaagttgttcttcagcacgcgctgccacttcagctcggggttgcccatgcggatcggcacggttcccacgccggtgtagtagatgttgctgttgctgtacttgtaggtcgtgatggcctgataggggctgccggtggtctggccgttgtatccccacgaccatttgaggcggatcacgtcgatccattcgacgttttcgaggaacttctccttgtggaggttccatcccaggccgaacgaccacatcggggcgaaccggttctccttgccgtaggccgacgatcccgacgtgcggtaggaaacgtcggcgaagtaccggttccggaagtagatgttgccgctggcgaagaagccgacctttgccagcagcgtctcggttccgctcgggaggttcgaggagtcgtatcccagggcgtatttgatgtccgagaggttgtccttcaggaaacccatcgccgtgatgtaggaggtcgtggcgttggtgtgctggatgtcgcttccggcgttgatcacgaatcccgagccttcctgtccgatgttgcggccgtagttgagcacgatcttgccgtcgtagttgaacgccttgcccgtgcccagtccgtagagaccgcgcttggccgggtcgttctcgccgaggaactgtgcgtcgtcgggcgaaacgtatttgtccgactggctgctcttgacgtcgatgttgaactgtcccgagacgtagaaatccttggtcacgtaccatttggcgtcgaccgtgttgcggagggtctggttgcgcgaggtgctgaaactcgacagcgtggcattgtagagcgggttggcctggtagccttcgctcgtcgtcgaggtgtcctcggggtcgaaatagaaggctttgaccagttcgccgtactcgtcgtagggcgactcgtaggggttgagtttcgtgtaggcgctgaatttgccgtagggcgaatccgttgcgtcggtcagcgtgtagttggccgtgtaacggagcgtgagtttgtcgcgcatgtggtagcctatcgaaaagttgagcgtgtagttgcggcggttgtcgcccttcatgacgccgtacttgtcgctgaagcgcagcgacgcgcggtagtcgatcttctgtgcgcggccgctcaacgagagcgagtgggtgtggctgaacggtacgcgcagcggggcgcgtatccagtcggtgttgacgccccggcggacgttctgcaatttgtaggcgtaagccttgtccatcgcgccgttgtccgattcgtaaagcccggccaggcgttccagttccagtttctgcgccgcgttgcagaggttcatcgaactcaggtccgggatgctcagctcgggcacgaagttgtagctcaggcggggtttgctgtcggtcacctgctggcgttcgatgacgattacgccgttggccgcccggtcgccgtagacgatcgaggcctgcgcgtccttcaggacgtcgatgcgctcgatttcgtacatgtcgaggtcgtacagctcttccatgctgatttcggcgccgtcgaggatgatcagcgggttgttgtaggccttctcctcggccgaggtggcgatggagttcgagccgcggatcaggatttcgggaatggcgttggggttcgagccgagggcgttgttctgtacgaccaccatgcccggggtcacggcgctcagggccgacatcaggttggtgttcgagatggccacgaggtcttcgcccttgatcgaggtcaccgaacccgtgtaggtgctcttgttgcgggtgaacatgccgttgaccaccacgtcgtcgatgcgcgtgccgccctccttgagggtgacgttcaggcccttcgccgagccggtgatgatcacctgctgggtctccatgcccaggaacccgacttcgaggaccgcagggctggtcttggtcgaaaaggagaaggtgaactggcccttttcatcggtcgagacgccctgtcccgagccgcctttcagaatgaccgatgcgccggggagcaccgtcttgccggcgtcgcgcacggttccgctcacggtgaacttgcgcatcttgaccgtcgagtcgtagaccagcacgacgttgttctcgatggcgtatttgaacgttgacccggcgatgcacttgtcgagcagttcgtgtacggtgactttcttgaattcgccgctcacggccgggagccggcggatgtcttcggggtcgtaggcgaatttgatgcctgtcttccgggtgatttcgtcgagcaccgccgtcgcgggtctctccgtcagcgtgacggtaagcgtcgcgttcaggttgatcggttcaccccccccctgcgcccgggccgtagcggctgtgcagcataacaagcccacgaccagcgacagccgcagcgcacggctgaaaagttgtagaattctttgcatgtgtttgggttttaggcagaccggccgccccggccggtctgctcgggttttagttcttctgtgacgggaacaggctgcgttcgagtacgtagatcatgccctggtagtgggcgcgggtctctcccgtagcgcttttcacgcgcgaacgcagcagtttcaggattcggtcgttgacgttgacgaacagcgcgcgcgactcgtcgatcgaccgcagctgcacgttgtactgccagccgtagcccgacgacagggcgtcgctgttccagagctgcgaggcgacgtatcccttgccatgctcctcttcggcctcgcgcagcgggccgaggtaacgctccacgatgccgctccggtcgagacccatcagcgcgatctcgtccaccgagggtgcgtaggcctccgcgatgccgcccagcttcatgcgcttggcctcgctggaggcgacgtccgcggccgcgtcgacgaacatccgctggatgagccgctccgacggcgacaccgggcctcccttgatcgtgctttcgaagacgatgttgtagaggtcgtccatatactcctgcggcgtgtagggatcgtcggcgatgtgcgacgagagcgtgacgttcttataataggtgaagaacgcgcggcagaagttgaagcgcaggatgaacgagaggtccacgtgcagcggcagtttttcggtcagcgcgggctgttcgagccatgccgagtccttcatctgcgcaagcacccatttcagcgatgcgcgctgcaactccttcgggacggaaacggcctgcggaccgcccgccgtgttgctgttcacgtccgtgaggtagatgccgcccacgttgagcatcacggcgttcacgtagcgcgcgaactgtccggccgcggcctcgtaaagctccgtgcggattttcaggtcggggtcctcctcgtcggtgatccactcctccatgtgcgagaggacgtatttgaggttgccgatgccgtagtcgccggccttgatgtggtcgtcgccgaggtcctcctcgatggcggtggggtcgtagcgggcgatcacctgctggcggccgtaacggtagatcgggtcgccgaccttctcgtcgatccatccgcggatggtcttctcctcgtcgaacatgtccttcttgtcgggcagcggcgtgtaggcgtatttgatgacgtagtcgtcatagggtccgaggtccggcggggtgagtttcacgcccttgtcgcccggctgggccacgtagttgaaacgcgcgtagtccatgatcgagggggtcgtgccgtgctgctgcgtgaacgatgcgctgcggagcgaatccacggggaaggcgctcgatgcggccatgttgtgcatcagtccgaggcagtgtcccacctcgtgggcgaggatgtactccagcgactcctggaatacgtcgtcgggcagctccttgccgcgcacgcgctcgtcgacctgtgcggtctgcacgaaacgccagttggcggccagcttcaccacgtcgttgtacatcagcaccgaggcgttgatgatctcgcccgagcgggggtcgacccacgagggtcccatggcgttggccacggcggccgggacgtagcggatgcaggagtatttcaggttgtcgggatcgaattcgggatcgtccttcgggaagtcctcgatgtgcatgacgtttttgaatccgatcttctcgaaggccttgttccagcgcagcacgccgcgacggatcggttcgcgccacagcgcggggaacgcgtcgtcgaggtagaagacgatcggcttgaccggctccacgagttcgccgcgtttccaggcctccaagtctttgggctggatgttccagcggttgatgaccgagaaatcctcgatcttgtccttcttgccgttgatgcgcgacatgtcggtcaggaagatgccgatgcgcgaatcggccaggcggggccgcatcgcctcttcgggcagcagcaggatcgtgcgcgtgaccttcacggtcatcggctcgtccttcttgatgaccatcaggcccagcaggtcggccgtcaccgagtaggagagataggatttgacggtcacgttgtcctcgaaggacttgatctggtcgatcaccgaaccttcggacttgaacttgcccgtgatgttcaccacgccgcccttggtgcttttgatcggggcgagcagttcgttgtcgcccgagaagaacttggtcatttcgatcaccattgccgagctgtcgcggttgtagcagaccagcgggtaggagtgcatgatcggcgggagggtgctccggccgatggccttggacatgtggggatcgttcgtgtcgtgaacgggcggcacgacggcctgcgagaggtagatcgtcgtgtcgatgcgcgtgaacttgacgtggatggggtccgtgggtttgtagccgatggtcccgaggttggtgtcgctggcctccgagatcgtggaggcgatcagcatttcacggccgatcgtcttgagggggacctccacgtagagctttcccttgagcttgtggagcgtcaggaaaggccctttggcggtgaggcacgatttgtcgttgacgaacattttggtgtacttgtcgactttgggtttggcgacctcctcggttttcgattttttctttttggatttcgaggccgccgcccccgacgccggggcgatcagtaggcctgccgccaggagcaggacgcagagtttggatagtgaacgcatataagtaaaattggtgaatagacgtatttttgtaagtatataacgtgtttaagtttcagaatgttaagaaaaaatcgttttgtcgtatgatttgtttttgccgatatcctgttcgggtgcggggtcgacgcacaaagatataaaaaataggccgaatggtacatttcggccgttttttgaccctgttcctttcggccgcaaatcccggaaaacggggttcggcgggcggttttgctgccctatggtcgcaaaacccctgccgcgcggctgatggaatattgcgcggcaggggttgttttccggaaagccggggatttacttgcagtcgtcgatgcgggtgattttggccccgagggcattcagacggccgtcgatgtccttgtagccgcggtcgatctggtcgatgttctggatggtcgagaccccttcggccgacatggccgcgatcagcagcgccacgcccgcacggatgtcgggcgaggtcatgcgggtcgcgcgcaggcatagccggtggtcgtggccgatgaccgtggcgcggtgcgggtcgcagagaatgatctgtgcgcccatgtcgatcagtttgtcgacgaagaacaggcggctttcgaacattttctggtggatcagcacggcgccgttggcctgcgtggccaccaccagaaagatcgacagcaggtcgggcgtcagtcccggccacggggcgtcggcaatggtcataatcgagccgtcgaggaacgtgtcgatgctgtaatggtcctgctgggggatgtggatgtcgtcgccccgctgttcgaaacggatgcccatgcgggcgaactgcgcggggatgatgcccaggttctcgaacgacacatccttgatcgtcagctccgaacggttcatggcggccatgccgatgaagctgcccacctcgatcatgtcgggcagcagccggtgctccgtgccgcccaacgcttcgacgccttcgatttcgagcaggttcgaggcgatgcccgaaatcttcgcgcccattctgttgagcattttgcacaactgctggaggtaaggttcgcaggccgcgttgtagatcgttgtccggcctttggccatcacggcggccatcacgatgttggccgtgccggtcaccgacgcctcgtccagcagcatgtaggtccccttcagctcccggccttcgaccatgaagaactcgtcggcgatgtcgaagttgaacttcgcgccgagtttctggaatccgaggaaatgggtgtcgagcctgcgtcggccgatcttgtcgccgcccggcttggggatgtatcccacgccgaaccgcgccagcatcgggccgatcagcatgaccgaacccctcaatcgcgtgcagcgttggcggtaatcgtccgatttgaggtattcaaaatcaatgtcgcgggcgcagaacgcgtaggcgtcttccgcgagctgctccacttccacgcccatgcagcggagcagttcgatgagctgcatcacatcgagaatccgggggatgttcctgacgacgacccgctggggcgtcagcagcgtggcgcagagtatctgcaacgcttcgtttttggctccctggggcgtgatttcgccccgcagtcggtggccaccttcgactttgaaaactgccatatgtgctgtcgtgtgttatccgtctgaaaaacaaaccgctccggaccggtcggcgctcatgccggcttccggagcctcctttactttacaaaggtagaaaaaagaacggacggaaacaaaactgaatcgcatgccgtccgacaaaatttccgacccctgaaagtgccctaacggcgccaaagatagtgggattcggggcttttttcggggttttggaaaatattttcgcgaaaaacttttgcggataacttttttgttgtacttttgcaatccgtaaaaatgtctgaaacaataaaaactatatagctatggcaatgaagagaacataccagccttcgcgtcgcaagcgtatcaacaagcacggtttccgcgctcgtatggctacggctaacggtcgcaaggtgctggctgcgcgccgcgcaaagggccgcaagaaactgaccgtatcggacgagtcgacgttcaagtacgcttaatttcctgcaggaaagatttaaggtcggctttttgccggccttctttcgtttaatgcctgttgtgccgttatgctttcgatccgccgggcttccgaagccgattgcgcgctgatccgccgtctggccggggaggtcttccccgccacctaccgcgagatcctcgcgcccgcgcagctggattacatgatggagtggatgtactccgaagagagcctgcaagggcagttccgtgcggggcatgtctggttcatcgcctcgtccgacggcgagccgtgcggctacgtttcggtcgagcggcagggcggggatctgttccacctccagaaaatctacgtcctgccccgttttcagggcctcggcgccggggagtttctgttccgccgcgccgtggaatacatccgcagcgtgcatcccggaccctgcatgatggaactcaacgtcaaccgccgcaaccgcgcgctgcatttttacgaacggatgggcatgcgccgcctgcgcgagggcgatttcccgatcggcgacggttattatatgaatgattacatcatggggttggagatcgtctgaccccgttttcagtttcctgcttattcctccagcacccgtttcacgccgcggtttccgacgaccgatatgcggctgccttcgatcagcacggcgcggccgcggtttttccgccggttgcgttcgttctgtacgttgaccgctatcacgcggccgtcgtggaaggtcgaaatgtcgggaaaaatcgtgtgtccgatcaggagccggtcggcgtcgtaacggcgcagcagcgcgtcggtctgttccggcgtcagcggatcgtatttttcatccgtgcagaccatcccgcggtaccagaccggcccggccgagcggtacaggaattcgagcgtcgggtcctccctgcgctccttcgaggtccggtaaagcccttcgctcatccgggcgttgagcgtatccatttccagattgcgttcgagcagtcgggcgctcaatcccgcgtgtacgaagaggttgcggccgatgcgcagcatcgtgttgcgggtcgcgagccagcggccgagttccgtgtcgggcgaaaacagttggcggtaattctccatgccgagttgccgcgccgtttcgaggtacttcccgcgcgtgtagcgcacgtcgccggccagcaccattccttcgtgattgcccaacagcaacacggcggcgcctcccgcgtcggcggcctcctgttcgagtttgtacatcagccacaacagcggcagcacgtcgtagccgcggtcgaaaatgtcgccgatcaccgccagctggttgtttccgtagctccaccggcagtcgccgtcgatcacgccgtgggcctggaggagcgtcgcaaaactccggaaatcgccgtgaaggtcggacgtgacgaacagtttcggggcctgcgggagttcccggggacctcgctcgacggcgtgcggcgtgacgctgaagaggtatgcgccccggctcgaacggacctcgaccgggccgcctccgtaaggcatcacgcggacgcgcccccgcttgtcggcggtcgctgcataggcgcccttttccgcgtcgtagacgatatagggtccgtcggccgggtgtttccggcagaggttgtatttcgtcggtttcggctgtgctgcggcgtccgccgccgggagggtgcagagcgctgcggccagaagcgctccgaacagcagggtcaggcgtttcatcttccggtgcgattcgggggcgttattcggcctccgtcttgaacaggttcacttcgccccgctcgaccttgccgtgcatgtcggccaactctgcgattacgggggatatgtattccagcgtgtccgtcacggccgatttgtcgccctcgcccttgatgcggtagagcatcgcggcgtagagcgcgcggaagcagagttccgtgtcgttcatccccgggttgcccagaacgctccgcaggcgcggcagctcgggttcgaggcgggcgtacgtctggcggtaatgcgcgccgacggggagtttcatcagctggagatgcaggtcgtgcaggtcctgaatcaggtggagcgtatgttccagatgccctttctcctccttgccttcctgacggagcaggttcgccagatccatgtaccagagcaggaagacgtgcttctgctcctcgccgatgtccttgcgcggggcgatcagcgtcgagaagatggcctcggggctgaattgcagcgcccggagcagatcctccagctgccagaggtagagaatgtattcggcgatgttctcccgccgttttgcttttgcaatgtccatagttagaattcataattcacaattcatcattcataattttactttgctgaaataatcagcatccgcaaactcaacaattgtgaatgatgaattgtgaattttgcattatttaatccacgttttcggtcccgtgaggtgcttgaggaagtactgctgcgatttgaggaggttgcgcgactggagcaccatgttcttggtctcggtcaagatcgtgaggtacagcatgctcgccttggtgttcgaacgggcctcgttgatacgcgtaagctcggatttgatggcttcggcgatcgactcgaacagctggtcgcgcatcgtcagcaccgtttcgatctccgagaagtcgccctcgcgcagcatcaggttgatgtggcggtagatcgactccacgtcgtcgttgatcgacatcaggtcgcgggcctgctccttcgaaagcccctcgtggttgttgtcgatatgttcgaacgccgggcgggtgatgtgcatcagcgccttggtcatttcgttgaggtaatcgaccacctgcacgtagtagtgggcagtgttgacgtcgccgccctggagcttcttgagcgtggggagcagcgagtatttccgttcgcgcgactggtagaacaggtcgttcgactccttgaccatgtcgcgcagcaccttgcggttctctttgaagacggcgatcagcgtgcggtcgtaaatcttcgtggcgcactccatcgtgcggcacacctcgtcgcgcaggttggcgatgatgtcctcgttggtgtcttcatgctccttgacgatggcgctctccttgttctttttcaggaaattgctgtggatgagcatgtacccgcacaacagcgtgatgacgatgaaggccggggtcccgccgtagatcagcgccagccccaccacgaaggcgatcaggaatccgcccagcgcggtgatgaaccacccggccacgacggtcataacgcccgaaatgcggtacacggcgctttcgcgtccccacgcgcggtcggcgagcgacgaacccatcgccaccatgaagcagacgtaggtggtcgacagcgggagtttgagcgaggtggccatggcgatcagcagcgccgaagtggtcaggttgaccgtggcgcggatcatgtcgtagggcgcgccgctgtgttccacgtcctcgtattcgaaacggcgcgaaatgctctcccggaggtgtttcgggactacgcgctcgatgcctgcgctgacgttgagggctgcgcggacgatcgtccgcgagaagaccgacgagccgtactgctgctggccggcgtcgtcctgcgccgagagcgaaagctcggtttcggagacgtgcatggccttcttcgaagtccacagcgtgaggatcatcaggatgcccgccgtcagcaggatcaggaaattggccgggacattctcgttcagcgcgcccatgagcatctgcgtgtcgcccgcttcccgggcgatggtgtaggcgtcgaacccggccacaggcacgccgatgaagttcaccaggtcgttgcccgcgaaggcgagggccagcgcgaaggttcccgaaaggatcgtgatgcgcaggatgttgactttgaaacgctggatgaagaacagcagcagcgagcagaccacccagcagatggcgatggccgagggcaggtggttgtcgatcagctggatgaaggcatggtccgcgagtatggatttgagacccttgaagacggcgaaatagacgatcgccgtcagcgaggccccgcaccagagcgatccgtagcggcggaaaagcgccgtgtagcggaacgaaaagatcatgcgcgagacgtacatgaccagcgtgccgcaggtgaaggcgatcaccaccgacagcaggatggccgaaacgatacccatggcgcgcgaggtgttgatgtagtgtccgagcgaggagacgctctgttccgggtcgttcgagattttgtagatagacacggcgatcgctgcgcccagcaggcagaagatcagcgatacggtggtcgaggtcgggagtccccacgaattgtagaggtccagcaggatgacgttggcgaacatgacgcccaggtaaagcatcatcacttcgtggaaggtgaacagtccggggttgaacatgccgctgcgggcgacctccatcatgccgctcgacgtgaccacgccgatgatgatgccgacggacgccacggtgaggataatcttcatcgaggcggctttggagccgatagcggagttgagaaaattgactgcgtcgttcgtgacgccgacgaaaagacctgaaacagcgaggattcccagaatgccgacaatgacggtgtagatttcgctcatgttggggttttagtgcaaattgtgaacaaatttacgccattttttccgatgaaatggttatgacatggattgttaacattaatttaacacagcgtcccggcggaagatgccggatgttcccctgactgccggcccgctgtctgctgcggggccgtttcccctcctttgctcggggctttccctattgccggagcctgttctcgcggccgcttctgttccgcctgttttgcctcttcgggttgcgcgttcgattcgcccggcgcccgcgatccgcaggtcgtggacaaacttgcggccctgcggcgaaaccttgcccccccggctgacgcaaaaaagcggcggaccgatgattcggtccgccgcttttgcattatcgggcgcagcgccggatggcgacatccgaagcctgtgtgccgcctccggacccggctctttgcggggggcgtggaaccggacggtacgcggagggcctgctgcggtccctgaagccggtcttttaagcggggccgggcgcagaatgggctgtgccgttccgactggcctctcgcctcctgaagcccggcctttgccgggttattcgtcgtcggtgtcggtgtaggccttgagcagtttttcctgcacgtcggcgggaacctgctcgtagctgccgaatttcatcgagtaggtggccgaacccgacgtcagcgacgaaagggtcgtcgagtagcggtacagttcagccagcggaaccagcgcgttcagccggtcgaatcccttgtccgactccatgccggcgatcatcgcgcggcggttctggagatccgacatcacggcgcccatgtattcgctcggcacgagtacctcgacgctgtatatcggctccatgatcttgggtcccgcgttgcggaaagcctccttgaaggcgttgcgggccgccagcttgaacgagatttcgttcgaatccaccgggtgcatcttgccgtcgtagatcaccacgcggatgtctcgggcgtacgatccggtcagcgggccttcgtccatcttctccatgatacctttcaggatggcgggcatgaagcgcgcgtcgatggcgccgcccacgatcgccgagtagaattgcagtttgccgccccacggcaggtcgtattcctccttggtcttggggttcagcaccatgtcgcccttgccgggtaccttgtagttcttcggttcgccgatgccctcgtaatagggttcgatgatcatgtgcacctcgccgaactggcctgcgccgcccgactgcttcttgtggcggtagtcggcctgcgcgaccttggtgatggtttcgcggtagggaatcttcggcgcgatgtattcataggcgagtttgttctccttctcgatgcgcgagcgcaggatgttcaggtggtgttcgccctgaccctggatgatggtctgcttcagctctttggagtattcgaccagaatggtcgggtcttcgaatttggcgtcgttgagcaccttgcccagtttctcctcgtcggcctggtccttgcatttgatggcggcgcggtagcggggctcggggaagacgatcggttcgatcgtcacgggagccgacggggccgaaagcgtgtcgttcgtccgcgtgcccttcagcttcaccgtgcagccgatgtctccggccatgagttccgtgaccttgatccggttcttgcccgccacggcgaacagctgcgagagtttttccttgtttccggtgcgggtgttcaccaactccgctccctcggcgatcctgcctcggatgacgcggaaataggtgatctcgccgatatgctgttccacctggctcttgaagacgaatgccacggcgggtgcggtctcgtcggccgtgatctcctcgccttcggtcgaaaggaatgccggggccttctgcggaccgggcgccacgttgatgatgaactccatcagacgcttggtgccgatgtcgcgcttgcccgaggtgcagaagatgggcatcacttcgcgtttcgagacgccgatcttcaggcccgagcggatgtcgtcctgcgtgagcgtgcctttgtcgaagtagagttccatcagcgcctcgtcgtgttcggcggccatctcgaccagctccttgttcagctcctgggccttttcaagctcttcggccggaatttccagctcctcgcggtggccgtcgttgtccttgaagcggtacatcttcatcagcagtacatcgatgaaggcgttgaactccggaccctggttgacgggatactgcacgatgacgggtttcacgcgcgacgaagcccggatcgactcgaccgtggcctcgaagctggccttctcggcgtccagctggttcaccacgccgatcacgggtttttgcagcagccgggcgtagcgggcctgaatctcgctgcccacctcccagccgttctgggcgttgaacaggaagacgcccacgtctccgaccttgaaggccgagaagaggcttccgcagaagtcgtccgagccggggcagtcgatgatgttcaacttgcggtccatgaattcggtgaagaggatcgtcgaatagatcgagcgtttgtattcgtgctcgatatccgtgttgtccgagagcgtgttgttcgcctcgatactacccctgcggtcgatgaccttaccctcgaaggccatcgcttcggcaagggtagttttacccgtgccgggcgcgccgatgagtacgatgttcttgatctctttagctgaataatttttcatattctcgtatggttttaaggtttttcggttagccgactataaatatacaaattattcgtgaaaaacaacttcgggaatgaaaaaatcgccctttgagggcgatttttcggtctgtcggaaccgcggattcactttgcggccgcgggacagtagtgcgccagcgcgggcagaacgatccgctccatgacgtcgtatccttcggacgtgggatgcacgccgtctttggtgtactcgctgcgcatcgagccgtctccggcgtccatcgccgtgtaatagtcgacccagatcagcccgcggtcggaggcgtaccggtgcagccgtgcgttcaggtcccggattttttcgggaaccgactcgatctcggtcctccaggggtattttccggccgggagcacggagcagatgatcggccggatgcctgcggccattgccagctcggccatcgagatgatgttttcgacgatgtgctgggtggcgatcggcccgttgttttgcgccaggtcgttcgtcccggcgaggatcaccaccgcctgcggatggaggttgatcacgtcggcccggaagcggcagagcatctggccggtgacctgcccgccgattccgcggcaggcgaaattgttcgccgtgaagaattcgggatgggcgttgtcccatccgtcggtgatcgagttgcccatgaacaccaccgcgggcggggtcgtgagctgcgcattggcttcggcatagcggccgtagttggcccagtcgcgctgttgggccgtcagcagggccggaagtgcgagcgcgatcagcagaatcagttttttcatggaggtcgttactttttttgagcttgggtgatgttgcgtgcgttgcgttcgtcgtcgctgcggcggcgtttgcctccgaaacggccgaagagccatcccgccgcgaaggcggccagcaggagaatgatgtccacgaagacgctcgccagccaccgctggatggccggagcgaaattccagagcagcaggaagacgatcaggatgcccagcaggcccaggccgattgtccattttttgtccatagtcgtattattgagattattctttttccgctccggctaaaagccgggttttaaagaggaccgaagcgcggtacaggctccgatatgcaattcctgccgtcgcccctaaaaaaggctttttaagccttccagttcttcgactgtgacggggattttccggtcgccgatgatgcggctgcccgactccgtcacgaggatgtcgtcctcgatgcggatgccgccgaaatcgcggtaggcctccagcgcgtcgtagtcgacgatgcccttgtatttcccttcggcgcggcacttgtcgatcagcgcggggatgaagtagagacccggttcgtcggtcatcacggtccccggttcgatccgccacgccgcgcggtagacgcaggttcccgactcggcggcccgttcggcgatcgagccgtagtcgaacgacctctcgcccatcgcctcgcagtcgtgcacgtccatgcccagcccgtggcccagtccgtggggcatgagcatcgtcatcgcccctgcggccacggcgtcggcggccgggcctttcagcaggcccagtccgacaagcccttcggcgagggtcatgtaggcggcattgtgcacctcggtgtacatcatgtggggcttcacgatgcgcgccacgtggtcgtgcgcggccagtacgatgttgtaaatgtctttttgcttttgggtgaagcgtccgctcacgggataggtgcgcgtgtggtccgagcagtagccttcgacggtttcgccgccggcgtcgcacagcagcagccggccctcctccagcacgccgtcggcgttgagattgtggagcgtctcgccgtgctgcgacacgatcgacgggaatgacacgccctgtccctgcgatttggcgacgccttcgatggctcccgcgatctggcgttcgacgacgcccgggcggcacatccgcatggccgtcgtgtgcatctcgtagccgatccggaaggcgcgttccatctcctcgacctcttcggcgctcttcttctcgcgcatctccgccacggcgaacatcaggtccaccgacttgtagtcgtgcagcagcgcgggtttgatgcccagcagcgccgacagctggagcttggtttccccgcggtagggcggcaggtagtggaccctgcggcccagggagatcgccctgcgcagccgtttttcaagctccgccatcgggaacgtcgccgtgacgcccgctccggcgcccatttcgcgcagcgtgggctgcggtccggtccagatgatgtcctcgacggtgaaatcgtcgccgtacagcgcctcttcgcccgtgtcggcgtcgatcacgccgacgaccgacggcacgttcagcccgaaatagtagcggaacgaggagtcctgccggaagtagtaggcgttgttgggataattgttcggcgagagcgaattgcccgggagcaggatgatgccgcttccgatcttcgtgcgcagctcgtggcggcgcgcggtataggtttttgctgaaaacatagtgttgctgttttcagcaaatatacgaaaaactaatttttaattcttcatttttcatttttaattctcttcagcccttcgggcaggggcaggcggatgcgcgcgaggctgacggcggcccctgcgacggcgaatccgcccgccagcagcagggccgtgtgggtgctgttttcgggcacgacgtggaacagcagggccatcagcgcggcgccggtcgtttgtcccgcgaggcgtgcggtggccagcatgccgctcgccgaaccgcttcgttcgggcggggccgaggcgatcaggatgctgttgttgggcgattggaacagtccgaatcccgcgccgcagagcaccagccgccagatgatgtcgaaatcggtcggatgctccggcaggaaggccagcaggaacagtcccgcggccatcatcgtaagccccgtgccgcccagcagcccggcgtgaatgcgctcgacgagcagcccggccgccggggccacgaccatgatcacggcgggccaggccgtcagcagcagtcccgtctcgacgtcgttgtagccgcaggcctgttgcaggtagaagggcagcgccaccatggcgagcatctgcccgaggaacgagcagaccgacgttgcgaccgagaccgagaagatcgggatgcgcagcaggtcgaacggcaggatcggatacggttcgcgcagctggccgcggatgaagaagaagccgacgacgatgagcgccgcgacgcccagcgagagcacgcgcgggtccagcccgtgggagaaaccctcgaccgaggccatcatcagtccgaacgtcagggcgttcatcactgcgtcgcgccagtcgaagcggtgttcgcgcacccgtacgggattctccggcaggaaccggcggctgagcgccagggcggccagccctatcgggacgttcacggcgaacagccacggccagtcggccgcggagaggatgcccgccgccagcgtcggcccggccaccgacgaggtggcgaccaccgtggcgttgacgcccatgccgcgtcccagccgggccttggggtagatgaagcggatcagcgaggtgttgaccgaggtgatggccgcggctccgaacccctgcatgacgcgcgccagcacgagggcctggagcgacccggagagcgaacagcccaccgacgccaccgtgaagagcatcagcccgccgatgtagaccttgcggtaacccaccacgtcgcccagcgccgagagggagagcagcgagaccatgatggccagctggtaggcgttgacgatccagatcgaatcggccgccgagatgcccagctgctgcccgatggtgggcagggcgacgttggcgacggtcccgtcgatcaccgagagcgatacgccgaaggccacggccagaatggctccgagccgttggggcatgggcagtccgtccgcaggacgctggggtatgtggggcgcggcgtgcattgcgacagcaaaagtagggatttttccgggcttttccggcaaaaggcccggaaattccgggccttcgtcgcacaactgtcatatgggcttttccgtcgcggcggccggtaagagagccgtcttccgggtcggcccgggtttgaactttttattttgaatggttgtggttcacagattctgtttccgctgcctttatcggcggcagctttcggggacgatgtcgccctcgggccggacgcccttgaggtgcttgccgaagaacttctccatggcgcggtagaagtcgaagcggttctcctcgttgtggaatccgtggccttcgttgtccttgaccatgtagtccacctccacgccgcgtgcgcgcagcgcctcgaccatctggttgctctcgttgatgttcacgcgggggtcgttggcgccctgaaccaccagcagcggggtcttgatccgcccggcgttgagcgccggggagttttcgcgcagcatttcctgctgcgtttcgggattgccgaccatttcgtacatctggtcgagcagcggcttccagtagggaggaatggtgttcaggaacgagaagaggttcgagacgcctacatagtcgatggcgcaggcgtagaggtcggggtctttgacgatgccttgcagcgtggcgtaaccgccgtacgagccgccgtagatggcgatccgggcgggatcggcgatgcctttcccgatcagccagttcacgccgtcggtgatgtcgtcctgcatctcctgcccccacttgccgaaggcgatctccgtgaagcggcggccgaagcccgtcgagccgcggaagttcatctgcaatacggcgtagccgcggttggccaggaactgcgcctcggggttgaagccccacgagtcgcgcgcccacggacctccgtggggattcaccaccacgggcaggtttttggcgttgcgcagggtcttgcccacgggcagcgtgaggtaaccctcgatgcgctcgccgtcgcgcgcggtgtattcgatggggagcatttcggccatctcctcctgtttgatccacggacgcaggtcggccagtttggtcatcgtgtcggtggcgacatcgtagatgtagtaggcgcccgccgtgcggtcgctgccggcgtagacgatgtatttgtcctcggccttgtccgaaccgacgatgcccagttcgtagccgcgcaggtggcgctccatgcggccgaacagctcgccggcctcacggtcgaagaagtggcgcgtcgtccccttgtgtccttcgtacgatacgccgagcagttttttctccttttcgctgtaccagacgcccgccaggtcgtaggtgtcgttcgtatagagcacctctttctcctcgcacgtcgcggggtccatcagcacgagggcgtccttgtcgcgtccgaggttggtgatggcgtacaccatcctgttgtcgggggtgaacgtcgcgaagctgaccccctccttgaaattggtcgtcagcacggggcggaactcttcggcctcgctctcgcggtagcggatctgggtgttgacgccgtcgacgatggcgtaggccacgcgcagcttgccgtcgtggtcggtctgccagccctgcacgtcgccgggattctcgcagagcagggttttctccccggtgttgaggttcaaacgataggggtcgaatatctgcgggttgcgctcgttcgtgccgatgatcatcagcgagtcgatctcctccagcgggtcgatgatcgtggtccgcacgcccggaacggcggtgtaggccttcgggtccgtgccgtcgatgttgacgccgtagagctggaaattctcgtcgccgcccgtgtccttgaggtagaggatgcggctgtcgttggcccagaagtatccggccaggtcgcgttctctctccgaggtgatgcgcacggcctcgtccgacccgacctgctgtacgaagatgttgcggcggctctcccagggggccatgtaggagaagtattttccgtcgggcgaaatctggtagtccgacttttccgagttgcggaagaaggtctccatcggcagctcgggggctgttttcggggcgcaggcgacggccgtggcggccattgcggcgatgatcaggagttttttcatgggatttattcgtttgagttctcttcttgttttccggttttgcgccagatgttcgtcaggcagaggagcaggccgatcgcgatcggcaggttgaacccgtgcggcgactgggggaacatcagatgtgtggcgaccttcacggcgaaagccgcgacgacgagaaaaacggtcagaatgcggatgactttttcgatttccatggggtgtcttttttgttttcgacactgcaaacatacgaaacaatttttgaaaaacaaataatatttattgaaattcgataaataattttcgatagttggccgttttcggttttcgtgtcacgaaaaaaggcgcacctttcggatgcgccttcccgtcattggggggggacggtcagatcttgaggtatatctttttccggtcgaggaaccacagcagcagccagcagacggcgacgtaccccgccgagagaaccacggcggccgcctcgggcgagagtttcgaagccagcccgccgaagaagaactccgaggtgtagctcacgcggacgatccgctggaccatgtaaatcgtgatcgaattgacgccgatgaccttgaagaaataggtccaccgccgccattggcacacatctattatataatagaacagcgcgaacatgcccagcgagtaggctccggcggcgaatacgaaggccggagtccagagcttcttgttgatcggctgtaacgggtcgaggcagagcgccagcgccagcagcgcgaccgccccggcggccatccagagcgtcttgcggctgccggaggtccgctcttcggagcggcggacgaactcgcccgtgaacatgcccagcatggccgtcacgatggccgggagggtgctcagcagtccttcggggtcgaatcccctgccgcccagcaggtgcgagggcatgacgatccggtcgacgtagcccacgatattgccttcgagggtcagcggcccggcccctccggcgtcgggcgcggcgacgaattgcagcagcagtccgtagccgaggaggatcgcggcggcgatgactgcgcgcgtgcgcacgttgaaattgacgaacagcagcgccgcgaacatccacgccagaccgatccggcccagcacgctcggcaggcgcagcgtggcgaagtcgagcttgaacagtccgctgtaaacgaatcccagcgccacgagggtcaggccgcggcggatgactttcaggtagatgcttcgttcgctcatccctttttcgcgctgtttggcgagcgagaaggggaacgagatgcccgcgatgaagaggaacagcgggaagatcgtgtcgtggtggaagaatccgttccagtcggcgtgacccatctgggcggtcatccagtcggaaaattctccgggacagagcttgcacagggctgttaccagtcctgcgaatcccatgatgaagagcatgtcgaagccccgcagggcgtcgagcgaaagaagccgctgcgaggcggccggttgggtcggttgaggtttcatcggtattgggtttcaggttgtttcggcggggacgaatttgtagagctggtcgccgcggcggacgacgccgggcgtgcggatggcgcagagttccccctgggcgaccgactctgccggctgtccgtcgggtccgtgcagttcggtgagcgtctgttcggcgacgcccgtggtcgcgccgagaaagaagatcggttccccgacagcgagcggagccgcttcgaccgacacctcggctaccgagagctttcggtaaaagttcgtcacctttcccacatacactttgcgttgggtggccgacgatccgtaggcggggctgtgctccacgacggggcgtccggcgtagtagccttcccagaaaccgcggttgaaaaccgtgcggagccgctctttcagctccgcagttaaagcgggagtgtaggtcccggactccatcgccttgagcgcctggtcgtaacactccaccacgcgtttcacgtactccgcgccgcgggcgcgtccctcgatcttcagcacccggacccccgcggcgatcattttgtcgaggaagtcgatggtgcataggtctttgggcgacaggacgtagcgtccgtcgatgtccagctgcgcgcccgtctccttgtccgtgacggtgtatttgcggcggcacagctggcggcaggcgccgcggttggccgagcagttggtttcgtagagcgagaggtagcatttgcccgagacggacatgcacagcgcgccgtgggcgaacatctcgatctcgaccagttcgccccgcgggccgcggatgtcgtcctcgacgatccggcggcggatcgccgccacctgctccagcgacagttcgcgcgccagcaccaccgtgtcggcccactgggcgtagaagcgcaccgcctcggagttcgagatgttgctctgggtcgagatgtgcacctcctgcccgatccggcgggcgtaaaggatcgccgccatgtccgaggcgatcacggcgtcgacgccctcctttttggcgcggtcgatcacggcgtgcacgtcggcgatctcgtcttcgtagacgatcgtgttgaccgtcaggtaggtcttcaccccggccttgcgggccgaggcgacgatccgtcccaggtcgtcgagcgtgaagttggccgccgaggccgaacgcatgttgagtttcccgacgccgaaatagacggcgtcggccccggcccggatggcggccgcgagcgattcgtaactcccgacgggagccattatttcaatgtcgtagcgtttcatcgttcagtttttccggtccatcaggctcatggcgtagtcgcgcatgcgctgcgtccgcgaaggggccaccgaaagggtgtcgaggatcgacagcgcacgttcgaaacgcagctggatctgctgctcggtcaggcgcggcacgtccagtcggtcgtagatcgacttcaccttgccgatcttctcggcgtcggagagcgccgggtcgcggtaggccgtgcgcagcatctcgcgcgtcgcctcgtcggcatggctcatcgccgtgatcatcaggtaggtcttcttgccttcgaggatgtcgcccccgatggctttgcccagccgctggtcgccgtagctgtccagcaggtcgtcctgcaactggaatgccagccccagctcgacggcgaagcgccgcaggcggcggcagtcctcgtccgaagcgccgcccagcatcgcgccgatcacgaccgatccggccagcagcaccgaggtcttcagctcgatcatgtgcatgtattcgaccaccgagaccttgggtttctgttcgaaatccatgtcgtactgctgtccttcgcacacctcgagcgccatggtgttgaaggtcgagagcacctgcggcagcaggttggccgggacgctgctcaacaggcggtaggcgtagatcatcatggcgtcgcccgagaggatggccacgttctgcccccatttggcatggaccgagggcttgccccggcgcacggcggcgttgtccatgatgtcgtcgtgcagcagcgtgaagttgtggaacacctcgacggccgcagccgcgggcagcgcctgtttcacgtcgtcggagaagatgccgcaggagagcgtcagcagcatggggcggaggcgtttgccgcccccggcgagcgaatagccgatcggggcgtataggagttccggttcggccggaaattcggtctgggcgaggtaattttcgatggcggagagcatctgctcgttggtctgcatagtcttgaatggtacttttgggtcggaaactgtcccaaaaataggaaaaaactttggagtagccgaattttcgattaactttgacaggataaaactaacttttaacctgaaacacgatatgaaaaaactcgcgatcggcgtggacatcggcggcatcaacaccgctttcggcctcgtggatgaaaacggcgacctctatgccgaatcggtcatctcgaccaagaagtacccttatgttgacgactatccggcttatgtcgaggacctttgcgactcgatgcgcgctctggcgcagagcctttcgttcgagtacgaactgacgggcatcggcatcggcgcgcccaatgccaactaccacaagggcacgatcgaaacccctgcgaacctttggaagtttaaggagggcgaccccaatcccgacgagtcgcgccgcgtgttcccgctggcggacgatatttcgaagtgtttcggcggcgtgaagacgctcattaccaacgacgccaacgcggcgacgatcggcgagatgatttacggcaacgccaagggcatgcgcgatttcattatgatcaccctcggcacggggctcggttcgggattcgtcgccaacggcgagatggtctacggccacgacggcttcgccggcgagttcggccacgtgatcgtcgagcgcaacggccgtgagtgcggctgcgggcgcaggggctgtctggagacctacgtgtcggcgacgggcatcaagcgcacggcgttcgagctgatggcgaagatgaacgcccccagcaaactgcgcagcatcgccttcgacgacttcgacgcctcgatgatctcggccgccgccgagcagggcgatcccattgcgctggaggcgttccgctatacgggcgaaatgctgggccgcgcgctggccgacgtggtgacggtgacctcgccccaggccattttcctcttcggcggactttcgaaggccggcaagctgatcttcgaaccgacgcagtggtacatggaggagaacatgctcttcgtcttcaagaacaaggtgaaactgcttcccagcggcattcagggcaagaatgccgccatcctcggcgcctcggcgctgatctggcaggaagccgccaaatagccggatacggcttgtgccgcaagggcgaagtttccggacttcgcccttttttgaaaaccgaaaactttaaattcacagcaatgaaacgtttctttcttctgaccgtcgcgctgctgacggtctgggccgcggccgcacagatgcggttcgtggatgccaccgagttgaacctcatcggcaaggccctgccgacgccgcatccctaccaccggatcgacacggtcgcctacaagggcttcaccaagggcgagaaccagcaggtgcgctgctcggcgggtctcgcgctggtcttcaaaaccaactccacgcgcatcgacctggagccgcagtacacctcgttcgtctacgcgggggcaagcaccccgcgggtcgcttcggagggtttcgacctctacatccgcaaggacggcgagtggctttacgccgcgtcgcgcgccccgaagaaacgcggcgaggcctacacgatgatcagccgcatggactcttcggagaaggagtgcctgttgtacctgcccaattacagcgagctgacgtcgctccgcgtcggggtggacgagggggcgacgatcaccccgatggagaatcccttccggcataagatcgtgatcttcgggtcgagtttcacgcacggcgtcagcaccagccgcgcgggcatgagctacccgatgcagatcggccgcaacacgggcctctacttttgcagcatcgcgtgcagcggcaactgcaagctgcaaccctatttcgccgactacctcggcgacgtaaaggacgccgacgcgatggttttcgacgccttttcgaatcccgacgcgaagatgatcgaagagcggctgattcccttcatcgaacgcatccgcgcgaagctgccttcgacgccgctgatcttcgtgcagacgatctaccgcgagagcggcaatttcgacctccgttcccgcaaaatcgaagaggacaagcgcgacatggcccgtcggcagatggccgaagccatgaagcgtttcgacaacgtctatttcgtcgacaaggcggacctcacgggaacggaccacgtgacctcggccgacggcacgcacccttcggatctgggctattggcgctgggcgcagaacctccagcccgagttgctgaaggtattcaggaagtgcggcatccgctgatacggcgggttttaccggaaacaagaggaggaggctcgcaacgagcctcctcctcttgttttgcacgtgtcggaatcgcttttgctgcgacaccttgaacccgtcggtccgcaggcggcagtcggtctcttcgccgaccggcgtcggccgggtgtcgcggggcgctcccgcggcggttgcggcggttgcgacggttgcgacggttgtgacggttgtgacgttgcggcgccgcaacgtcgcaatgcggtccgctccggaagttctccgctccggcggtccgggatgctccggcgggcagctctgaagcgaaaaagccggacgacacgactgtcgcccggcttatgaacggaggtgcgccgacgttatttcatcaccacctgcgtctggccgatcaggcggccttcgcagtagagctgtatctggtaggttccggcggcgaatcccgtcgagttgtagtagatgcccacttcgaggtcctggttctggtagtcgacctcgcgcatggccgagtagctcaaccgttcgccctcgaattcgaaggtcggcatggcctcggtggtcagcacgtagccgtcgggcgaggtgatgcgcacgtagacggccttgttgcccggggtggccagctcgttggccgcgagcgcgaagtcgacgcgcaggcgtgcggcgttcttgacccgcgaaacgggcttgctgcggtcgttgagcgccgagaggcggatgtcgcgggcgcggagcaccgaacccaccttgaccttgttgtccagttcggcggccttctcttcggccatgtcggcgcgcagcttggccgacgaaatctccttgcggaagccgacgttctccttgatgagctttttgttgagcgtattgagcgagtcgatctgcttcacgtaacctttcataatcgtgcgcagcgtgccgacctccttttcatactgtttgatcttcgcgaggttccacgaacgctccttcttgagacgcgtcatcagcgagtcggcgcgttcgcgttcgagggtcagcccggccgaaatcgagtcgttcgagatgcgcagcccgtcgtagtcggtcatcagccgccccaggtcgttctggatcgagtcgcggtcggcctgcaacagctcgttgtcgagcatctgctggcggtggatgctgaagtagagcaccgaaagcgcagccaggatcaccgagaggatgatgatgacgatgcggtagccgcggatggatttgcccgcatcgggctgcggggtggtgtagtcgtcgtcttcgaattccgaaggatcgtatccctgtttgttttccatagtgatccgtttttattacaaagatagtacgaaccggggtgcaacgcaaatttatttgctatgccgggagcgcctatccaggcaggtggttatctttggcaaagataggaaaaaatatgaaaatccaatgcgggataatgacataaccttattgttttcggtctcgtccgatgatggtctcgtagtttccggcgggttcgaaccccatcagcagcggtcgggggcgggtggtgtcgaaacgctcgccgatcaggctgcgcgccgggtcgtaccatcggcatcggatacccgccaggtccagcaatagatgggaaaggtcgtccgccgagaacggccggtcgagcgccccggcgacctgtgccgctacatcggggcggttgcggcggtaggtgtcggacatccagatcataaacgggatttcgaactggtatttgcagacctcgggggtgagcggcaggtcgtgcgagcggcagaagaaatcgcggtagtcgtagacctcttcgccgtggtcggagaggtaaacagcgatggcgtcgcggtcggtaaaacgtgccaggatcgcatcgacgacctggtcgttgtagcgggtagcgttgtcgtagtccgcgacgacctggcgttcctgctgcgtcaaatcctcgcggcgaatatccccgggcgtgaaatacgcctcctccttggggtagcggtcggaatagctgacgtgctgtcccatcaggtggaagacgaccagttcgggggtgtcgtcacgggaggtgagccggtcgtagtcgtcgagcaattccaggtcgtagggatggcggttctcattgtggaccgtgaacaggagcggtgtgctgcgggcattgaaaagcgctttcagtccgagatcgtggtaatcatagtcgtttccggcggcctggttgtccaggtgacaggtggtgtatccggcttttttgaagagggccgggaaaagggggctgtctttccaggactgtccggagccgaggcttgcaggcgaaaagaggtttgacagcacggacgtggtcagattcgccggggaaacgacatcccggaaaacgaagagttcgccccgccgaagccgctcttcgagccgggggttggtcggcagcggataaccgtaaaggctcgaatggtgcttgctgaacgactctccgataatgatgacgatgcagggcgagcggaaagagcaactctctatttcgaccgattcgagcgtgcggagcagttgctctgcgttttcggcggagaactcatgccgaaaccagaagagcgatgtgtgaagccgttcgaagggggtgagggttgcggtttggcgcatcatctctcccggaaaatcgccggtccgggtgagcgcatactgaaagtgcagccggctgacatagaaggcaccgctgccggccagcaggaataggagcgatatgcgtaccttgcggctgtgcagttcgaaccgaatcttccggtgttccgccagcagataccctgcggtcagcaggacgcatgcggcggccggaagcaggaatgccggagtcgtacagtaggttttcagaaattcgaggctttcgcgtccgtccgtttcccagagaagctggatgacggagaacgaaaagggcgttccgaaacggatcagcagaaaactttcagccagcgagaggaggccgaggcacgacaggacaaacacgcgatagatcgcttcggcgatccggactgcgagaatctccccccccctgtcgtgctgtcgcaggcatagcggcagtaccagcagccaggcccggaagagggacagcagggttccgtagaacaggtttcttccgggcacgaacgacatttcgttcaggaagaaacgaatgatgtccgggaccagcggcaggagtgccgtgaggaccagaaatgccgggtactcgccgaaaggccgcacgagaaacgcggcaatatgttttgcgaaacaggaggttgcggagcgttgcatggaacagtgacgtttttctccgcaaagataggggaaatttcccgtgttggtgcccgatgaaaatccggcgtctatttcatcaggctcgacaccgggtatttaagtcccttgtagcccgaaatgtaggcgttgatgctgccgatcttgaccggcgattcgatgtagagggggattttgttgtcgtcgtccgaaatccagatcgtgaagatcgtgccgtcggtgaacgagtagccttcggtcgtccctaactggcactcgaacttgagcgtgcggaaacgccccatgttgcggatcttcttgttttcgcgccccaggtagcggtagtgcaggtggcggatggtgtcttgcaggaccatttgaagcgtcgccggctcaccgacgcggaaattctccgcttgggccgaccgcaggttgaagaagagcgcgatggggtccatgctctcggccgtcagggccatctgcttctcgctgaaggggtttttgcggctccgccagcgggtgtggatggtcgagtcgggccagaggtaggtgtagtaactctggaaggtgtagtcgccttcgcggatgtcgctctcgaagcgcacggggcgcagcgacacggtgtcgatccacacggtgtagacatcctccaggttgaagaaccagcggtaggtgggcagcgtgcgccctgcgccttcgaccttgtagtaggacttgccgtcggccgtatcttccgaggtcttgacctccacggtcccgacctccgtattggggaacatcttggccttgtagctcacgcggtagaagagctgttcgcccggatggtagaactgcgcggcgaggggcgagagggcgccgagcaggaatatggtgaatagaaaccgtttcatcggacagggttttaatgggttaacgttttttcgggacggaatattacgaaatgcgtgaaaaatcaatctcttcgcggcccgagtagcgtcgccgcagagcttcgagcccccggttctgcgggtgcgccaacgccgggtccgcggcgagtatttctgcggccgcctcgcgcgagacggtgagtatctgcacgtcggccgtggggctggcgatcttcagatcaaatgccatgccgctctgcaacgtgccgttgatgtcccccgcgccccgcagcttgaggtcgagttccgccaggcggaacccgtcgttggtctcgcacatcgcttcgagccgcgcccgcgactcgcgcgagagtttttcgcccgacatcaggatgcagtaggactgctcgccgccgcggcccacgcgcccgcgcagctggtggagctgcgaaagcccgaaacgctcggccgactcgatgaccatgaccgtcgcgttgggcacgtcgacgcccacctcgatcaccgacgtggccacgagaatgtgggcttcgccctgtttgaactggcgcatcgactcctccttgtcggcgggcttcatcttgccgtggcagatcgccgtgacgtactgcggcagcgggaagtcgcgcgagatggcttcgtagccgtcggtgaggtccttgtagtccatcgcctccgactccttgatgagcggatagacgacgtagacctgccgccctttggcgatctcctgccgcatgaagccgaacaatttgagccgtgcggcgtcggtgtagtggaatgtcttgatgggccgccgtcccggaggcagctcgtcgatcaccgacacgtcgagatcgccgtagagggtcatcgccagcgtgcgggggatcggtgtggcggtcatcacgaggatatggggcggctggaggttcttggtccagagccgcgcgcgctgctcgacgccgaagcggtgctgttcgtcgatcacgacgaagcccaggttcgagaactgcacgcggtcctcgatcagcgcgtgcgtgccgatgagtatgtccacttcgcccgaggcgatgccttcgagcgaagcccggcgttccctggccttcgaggcgccggtcagcacggctaccttcacgtccattccgtcgagcatcttgcagacggtggcgtagtgctggcgggcgaggatttccgtcggggccatcatgcaggcctggaagccgttgtccaccgcgagcagcatcgacatcagcgccacgagggtcttgccgctgcccacgtcgccctgaagcaggcggttcatctggaatcccgtcacggtgtcccggcggatctccctgatgacccgtttctgcgccccggtgagcgggaaggggagtttttcggtgtagaaggtgttgaacacgcccccgacccgggtgaagaggaagccgttgcttttcgcgaggcgttcggtgcgccgttgctggatgttgagctgcacgcccagcagttcgtcgaacttcagccggtactgcgcctgccgcagggcctcctgcgattgcgggaagtggatattgtagatggcgtcgcgcaggccgatcagtccgtaccgggtgcgcacggcctcgggaagcgggtccgcgatgcggtccttcacgagcgtccaggcgttgcagatgatctggtacatgcccttcgcacccagcacattgcccagcttctcggtcgagggatagatgccctgcatgccgctttcggccttgcgcgagagggcctgctccatggtttccagctcgggatgggcgaccgacagttcgccgcggtagaacgacgggcggccgaagacgaggtattcgcgtccgacctcgatccgtttctcgatccacttgacgccctgaaaccacaccagctcggcctgtcccgtggggtcctgcgcgaaggccgtgaagcggcgtttgcgccctgttccggcataggcgacgcccgttatgcgggcgcggaactggacgtaggacaggcctgcggcctcggtgatctccgagatgcggtagatgcgtgtgcggtcgatatagcggaacggatagtggctgagcatgtcgcccagcgtgcggatgcccagctcccgttcgaggagttttgcccgggcctcgccgacgcccgctacgaatttgatgtcgttatcgagtgtatccacccggcaaatatagtgaaagtagagcgcaatgccaaacttgtttgggcattgccgagacgcatcctatgttctgtaaatatagtgaaagccgggcgcaatgccaaacttgtttgggcattggcggggtgcgtttttccgtcccgggagacgtgctggtcgggagcaggggctactccttctcctcgagggcgatgtcgacgcccgatttggcgaatgccccttgatcccagtcgccgtctcctttggccgtgcgttcggcctcggtgaattcgatgtcgacggtctttgcggcgaagtcgccgccgttggccgggccgtcggtgtcggtgagggtgactcttgccgtgttgccgactcccttgcccgaaagatcataggtcccgtcggctgcggtcgtcgcctccggtgtcggcaggtaggcgttgctccggacctcgatgcccttgatcggccgtccggccttgtcggtcaccttgcccttgatcttgtagttgttgtacgggaccccgtacatagataccaccttcggttgatcttcctcgttgttgcatgccgttgcaaatccgagcagcgcggcggctgccagcagtagtttctctttcatggcgttcgcattttagagatgtcccgaaatataacgattatttcgccgttcgccaaatcgttgctatctttgtacactgtaccggctgtcgagagcgttcattttgccgctgcttcctgaatctgttgcggggtgataacggctctcggtagtgggaggcagtacgttgtactgctgtccgatgcgtacgccatctccctccctgggggagggctggggtggggtcggatttgtaaacgtcgccgaaggcggcgataacgccgcccgacagcggaaagtgatgtgaggaagtgcgtaattacctaattgataaaccgatgaatctttcgaaattcatgcgccggacagcgagcgaagtgcgcatcgggcggacgacgatcggcggcgggcatcccgtcgcctgccagtcgatgaccaataccgacaccaacgacaccgccgcgagcgtggcccagatcgagcggatcgaccgcgccgggggaaagatcgtgcgccttacggcgcagggccggcgcgaaggtgaaaatctggaaaacatcgtccggcagctgcgtgccgacggtttccggacagccgttgtggccgacatccacttcgtgcccgaggtcgcggccatcgccgccaggtatgtggacaaggtgcgtgtcaatccgggaaattaccgcctcgaccgcggtgatcttcaggcgctgatcgcgcagtgccgcgagcggggcgtcgccctgcgcgtcggcgtcaaccacgggtcgctggcgaagcgcgttttcgacgagtggggcgacacgccccagggcatggtggtctcggccatggagtttttgcgggtgtgccgggagtgcgatttcgatcaggtggtggtctcgatgaagtcgtcgaacacgcgcgtcatggtcgccgcctaccgtctgctggtcgaggcgatggataccgaagatatgcactatccgatccatctgggcgtcaccgaggccgggaacggcatcgaggggcgcgtgaagagcgccgtgggcatcggggcgctgatggccgacggcatcggcgacacgatccgcgtctcgctgaccgaggcccccgaaaatgaaatccccgtggcgcagctgttggtcgaacactttgccgaccgtcccggcgagttcgaggtgctccatcccgagcgttataccccgaccgaataccgccgccgttcgaaggtgacggttcccgtcgtgcacaccgagccgctggagggtttccgggtgctcgaagccctttcgggcaacccgacggccgagttgcgcgccgcgatcctgaatctcgacatccccgacgaaccggtggtcgtgaaacgccgctacgaagagcgttcgctggagacgctcgccgtgaagggcgccgccgacctggggccgctgctgctcgacggcctggccgacggcatctggatcgacgctccgggatttgccgaaagcgaaatccgcgacatcgagctgatgatcctgcaagctgcgcgcgtgcgtttttcacacaccgaatacatcgcctgcccttcgtgcgggcgcacgctctacgacatcgagaaggccctcgccgacatcaaggcccgcacgtcgcacctgaaaaacctccgcatcggcgtgatgggctgcatcgtcaacggtcctggcgagatggccgacgccgactacggctacgtgggcgccggaccgggccgcatcaccctctacaagggccggacggtcgtcgagcgcaacattccgcaggaggaggccctcgaccggctggtggagctgatcaaaaagaacggggactggacgcccgcctaaaaggcgccggcgtaagccgccggttttaagaggcggcaggaagtttcgttctgcttccgctcctgttctgcgctcacacgcataaaaacggtgttttgcgtcggcaggacgcagctccgtcctgcggaggtctgctacgcgtcgctccatagcaaagccctgcgcgctgccgcccgcccgagaggcggggttcatccgattcgaccgcttcgtttcaggtgatttttaattttgaatttttacttatgtctactatactgcctcttgcataccttccttcggtggagtatttcacgcacctcctgcgcggcggctgcgtcgtggacctcggcgagcacttcgtgaagcgttccgaacgcaaccgtgcgcggatactggcctcggacggcgtgatggagctgaccgtgcatgtccgcaacgccaaccgtccccggcagcccgtgtgcgacgtgcgtctcgactattccaaacgctggcagcaccagcattggggcgcgctggtggcctcctaccgctcgtcgccctatttcgatttctacgccgggcggttcgagcctttctactgccgggagtgggagttcctcgccgattacaatctgggtctgctggaggtgttgtgttcgctggccggagtgccgatgcccgaactctcccggacgtatgtcgaggcggcccccggagacctcgacctgcgccccaaacgcaaagaaggcccggcgctgatcgccgagccttatttccaggtcttctccgaaaggatgcctttcgtccctaatttgtcgtttgcggacctgctgttcgccgaaggacctgcgtctgtttcggttttaggacgttgccgacaaggatagtcacgctgtcgcgcagatcccccgccgccgctttcacctcaatcatcccgtgtatggccaccgaatcggaccggtactggaagggggcgtattcgctcatcgccagcgtgtcccggccgacgatgagcgtcggcgtcccggccgacgagtagacgcggaacgcctgcttctcataatcgcgcagacgccgccgtttgtcgacgatatgcagcgtcggctctgcgccgttccacatcgccttgtacagatagtaggcgtcctttttctcgcggcggttgagcgtcacgaggcctgcgccgttgatcccgtagggacggcgcgaggagccgtagtcgaacatgttgtcgatccacgcgccccagaacagcgagtcgttttgcaggtttttggcatactcctcgtggaaacgcgtctgcttctcctcgggcatccagttcgaacgaggctcggactgcgccgtgtagctcttgtgtccgaggaatccgctgccgccgtagcagacgcccgaacgcaggtgggaccagtttttttgcagctggtcgcgccatacgatcacgtcgtcggtcgagccgcgccgccagccgacgtcctgctgccagacgatcaggtcggtgatgaaattgatgtcgccgttctggtcgctgcaagcgaccgtcgggcgcgaggggtccatcgtgcgggccgtctcgttcagccgccggatgtagggcgtcacgtcgtcgccgcgcatccagagacgcgagaagataccccacatcaccaccgacgggtggttgatgttctgggctacgatctcctgcaactggtccagtccgttctgttcgaaggcgggcgtggcgaaataggagacgtcgcccaggaacgacgagcggtgcagcggggcgtcgatccagacgagcattccctgttcgtcgcaacggtcgtagaggtactgcgcgtgcggcattaccgccgagcgcagggcgttggctcccatcgtgcggatgatccgcaggtcggcgtcgtaatcctccggagtcagcgtgccgcccgaaagggcgttgtcgtggtagagcgtgacgccgcggacgggggtgcgttctccgttgatcgtcagcccttcggccgtgctggcaccgatcgagcggaagcccgtgcggacggcgacgcggtcggtgatgctgtcctcgccgatggaggccgtcacggtgtagagcgccgggtcgcgcaggctccacagcgtcggattgtccaccgagaaggccacggagacgggtttgccgtcgaggcgcgccttctggcgtttcgagaagacccgctctccccgcggactggtgatgtcaacgttcagcgtgcagctgttgtcgcccttcgaggtgatgtgcacctcgatctcgccctcgaccttttcgggaccgaccgtctgcgggtgtacgagcacgccgtccgacccgaggtagagcggcgaaatggccgtgcgctcggtgaggatcagttccgcctcgcggtagatgccgccgtagaggttcatgtcggtcgaggtgggcagcacgtcgtcgcggctgctgttgctgaccaccacgagcatcgagttgtcgcttccgaaacggattttgtcggtgatttcgaacgtgaaggccgtggcgccgccgcggtgcgtgccgacgtgatagccgttgacgaagaggtcggcgaccgactgtacgccgtagaatttcacgaaaaggcgtttcgaagcccattcgacggggatatacatgccgttctggtagctgcccgtggtttcgagccagtagccctgggccagcggatcggtgttccagctgtggggcagggttacgtggcgggcgttgtcggaggttttctccgacttgaagaaaaagcgccacccttcgttgatcgggaagacctcgcgggcgctggccgtcattgcgacgacgttcagcagcaggagaatcgttaggtatcttttcatggcagagctggttaaatgctgtatgatgcaaagatagtgcaagccgggtgcagaaccaagcgttgcttggggtttgccgtggcgccgcctatccgtgcgggggtttatctttggcaaagataatacaagccgggctgaaaatcaaacttatctgtctttgccgttgcgccgtttgtgttccgaaggggaaatgccagccgggcgcaaagccggaacggggtccggttttacgcccggcgggcatcggggcggcaggtacgaaaaaatggcggactgcgcctcttcggtccgccaaaaagcaggggatgggtgtgaaacttgttaactaaaaaacaactccttgggggtcatcccctgccgaggatcgcttttgcggagccggcacagccggttgccgtgccggaccgcgaagcgtgtgaactttagcgtttgatggtaatcgtcatctcctcgcccgtgatctcgccgtactggtaggtgaagctcggcgttaccttgatgatgatgtccttcagcagcgtggcgctgttgttctcgtaggtcagcgtattgtctgtgattttgatatatgcggaagcatccttgtcgctggcaggggtatcggcatactcggccgatttcatcttgaatacgataccggcggtatttttcgctgcttcgggttttgcctggaatacgtcgtaggccgtcttgccgttgcctaccgtaacggcttcccaggccttcgtgtctttgttgtattcgatccacgacttaccgtcggcgtcgatcaactggaggttctcgaacatattggccgtagtcgcctcgttggtcttgtaagcgacctcgatagccttggtctgtgccagcgtcttgatcggggtctggatctccacgcgcagcggcagggaagctacctggatgttcgtgtccttgatcttaacgacagtcttgatgtcgacatagttgcggtttgctgcgctccagtcgagtttgtcgcccttgacgacggcgtatttgtcgcccttgttcggtttgtcgtctttggaggtcacttcgaacgtaaagtcgtacttctcggcgtccacctcgttgaagtaggtcggcagtgtgatgttgggccactcccagaggttggtcgtcccgttgaccagaccttcgactacggtcgtcatcacgcctgcgatgtcggttacgtgtccgacattgtacctcaagtcgaagtcggggatcgtgacattgtagttgaacgttacggaaatcttctggccgtaccaggtcgtccattcggctttctgctcgaacttgtcgcccgtcgcggtgatgtccttggcattcagcacgcccttcagggtcgatgcggtgacggtcattgccgtgccgttggtgttctcgatcaccgtgcccttctcatttgctttgttgaagagtttcgttacgcctgcgggcgttgcgggatcggtcgtagctgcgaagatagcctcggcgaactccgcttcgctggcgaatccggccttgttggctgtgtaaacgtccttccacgtcttgctgacgctcttcgtctcgtagccgatggcgttgtcgacgatgtagttgacgggcgccggggcggctccgaaggcgatctggcccttcagtttgtagtcgacgttctggtatacatagacatactcgatgtcataggccttgccccactcgtatgcatctgcctgaacggaggctttcacgcccatggcgatctggctggcgaatgcggtgaatcggatgccgagatcgttgtcgacctccttgccggcgaccttgaccgtcgaacggtccgtgtcgaggttgcccagcgtgataatatcctcgatggtgacctccttcggcaggtcgatgtcgttcaccaaagcgatttcgccgaagatgttatcggagatttccggagtggcggtctgcccggtgatgccgttcttgacgaacgcatagctccatgccagcggtttgggagtctccttgaaggtgaaggtcgcgccggcctggttggtgatgatgtaggtctgcggcgcctcgatcgttgccgtcgtggctttcccgtcgacgttgatcacgattttgtgtgcgcatacgacgttcttgcctacgtcgccggaaacgcctgctgcacggaagtccaccgtagcgagtttcgtgtcgtaaacgagtttcgagttgtcgacgcgcaggatgaatttgccgatctcggttttgtccgtaatctcggccgactggctggcgtcggcgtagtatttgggcgttacggtgtaagcgccgatgctgattttcgagccaagcagtttgttgacgttgtccagcgtcatcagggtcttgcctccgtcgagcgaagccagcagctgcgtattctccagcagcgtcttcttgctgacggcctgcttgttgaacggcatttcgatggtggcgtagtcgtaggcgaccggctcctcgtccttggtgtaaacgccgagttcgatctcttgggcttcgtcgggcatgatgctggcgaagttcgacagcacgttgttcgttacctccgaggcggtttcgtcctcggcgccggttccgggattcacggtgttctcgatcgaaagggccagcgtgatccatttctcctctttctcgtaaagctcaccaagctcctccgccgacatggtggcggttacggcgaacttaccctcctcgataaaccgaacgtcggtgatggcggctgcgggagttgccgttgcggcacgggtttttatctgctcggagacaatagcgaacgtcgcttttccgttagcataggcatctacgaggtctttggccagcgaggccggcgtgacgcggtaggtcagcgtgaccattccgttgccgatgggggtggctccgaccttgtagaaatccatcgtagtataggatccgccactgccaacatacatggttccgggaacgtttaccagcgactggatgcggttgatcagcgcagcgacatcggcctgaagttgggcgatggcctgcttgaaggcgccgagttccgcagtcaggtcgctcttcttcaggtagccctgcgtcgaaatgaggctgatgatctgcctgctcaatgcggattcggcgttctttaccgcttcggcggctgccgagttcacgttctcgatccaggctttgttgttgacgtccatgtattccttgacgaattcggaggcctcctcgccggcaattttgctgatggcggtcttgatgtccttcacggccgggtcgttggtgatggcggccaggacggctgcgacagcctgattcttcacggcagtggtcagctcgctgtttttggccagctcttcgaggatgccttttttgacctcgccgccgattttggaccagaggtcagcggctttgagctgattctcgatcagggccttcacctgcgcttcgttttgcaggcctttgatcagatcctgcacctgtgtcacggtctggaacccgaggtctccgactttctttttgaggtcggcgtccttgacgtaggctgccagctcctggctcaattcggcatcggtgacgaatttcgagaaatcgacatccttcagtttgtctgaaattgtctgaagggcggaagcatcggccttcagttcgactttcgcatttagatcgtcgatctttttgttgatgtcgtcgatgtcgtcgtcgtagtccttacacccgacaccggccagcatggttccggttaagaacaatgccaggaattttctaaacaagttgttgtttttcatagtaaaaatggttgaaataaagatgtgtttgtatttagttttcaatttgttattcggacgaccctctttttgttggtatcatatatgatacgcatggtgcaaatatatatataaaaatttgcacagcaaaatttttgtccaaatttttgaaatgggaatgaactatcaagatgaaatcctttatatctctacgaggatcaaggagttgaggaaggaacgcaagctgactgtacaggagctggcttaccggtgtgacatggaaagatccaacttgagccgcatcgaggcggggcggactaatcttaccgtaaaaaccatttgcagcatctgtaatgcgttgagtgttaatatgcgcgatgtaatacgttaggacgatatacctatatttatatatattgcgcctaatcgttcgttgtatgcttttttgggccgtttctttaaaattcgtatctttacggtgataatttaacggcttattgaacacgcttgatttaatcgtctgcctcgtgctggcgctggccgtctggaacggatggcgccaaggcttcgtcgtgcagatatgctcccttgcagggattgtggcgggcatttggatcgcggcgcgtttcggcgcgcaggtcggcggatggctgcggctcgatgacgaagtggccgccgcgggcggtttcgtcacggcgctcgtcgtcgtgatcctcgtcgtggcgatcgccggcagggtggtgcgcaaggtctttcactttgcgggactgggcgttgccgacacgctgctgggcattgccgtatcggttttgaagtacctgctcgtgttgagcgtgctcttctcggccttcgatgcgctgaatgaggattattgcctcgtggggccgcggacgatcgagcagtcgaaaagctacaagcctgtccggtggctttccgaatccattttcccttttctggagtgggtcggcgagcgggttccccggcaggaggaaaaaacggagaccgatggatagaaagtttacagccacagtggtccgggcgacgggcagttggtacgacgtgctgcacgacggtgagacggtgcgctgccgcatccggggcagactgcgcctgaaaggggtgcgttcgaccaatcccgtggtggtgggcgacgaagtggcgtgcgaggccgacgaggggggcgactatgtgatcgccgacatcttgccgcggcgcaactacgtgatccgccgggcttcgaacctttcgaaagagtcgcatatcatcgccgccaacgtcgaccaggcgctgctgatggcgtcgctgcgttcgcccgagacgcccacggagttcgtggaccggtttctggtgacctgcgaggcctacaaggtcccggtgacgatcctcctgtcgaagctcgacctgcaggacgcggaggccgtcgcggagttccgcgcggtctacgagggggccggctaccgggtgctggaggtgtcggtccgggagggccggggcgtggaggaggtgcgcgaactgcttgcggggcgcacgaccctcgtttcgggaaattcgggcgtcgggaagtcgacgctgatccaggccatcgacccctcgctggacatccgcacgggcgaaatctccgaaagtcaccacaagggccgccatacgacgacattttcgacgatgtaccccctggccggaggcggcgcggtgatcgacacgccgggcatcaaggggttcggactgatcgacatcgacgaggccgagctgtggcactattttcccgagatgatgcgcgttgcgcccgcctgccgcttctacaactgcacccacacccacgagccgggctgtgcggtgaccgaagccgtgaaggcgggcgaaatcgcctggccgcgttacgaaagctacctgaaaatccgcgatgaagatgaaaaataccgcaaataacgactccccgggaccggacttcgatttcggtcccgatgccgcacacgccgctgagcgcatcgcctgcctcgccgggtttatgacgccggaacggtatgccgttttgcggaagacggtctccatgcgcacgcgctacatgacggtgctggccgagaacatgtaccacgggcagaatgccgcggcgctgatccgccattgcgaggcgttcggcgtgcaggagatgcacaccgtggagacgctctgcccgttcgaacccaatcccgacattgcgcgcggcacgcaccagtgggtcgacgtgcgccgccacgcctcgacgggcgaggccgtcgccgccctcaagggggcgggctaccggatcgtggccaccacgccccaccgcgaggacgcgacgcccgagacgttcgatgtcgggcggggacctttcgcgctggtcttcgggacggaacacgccgggatttccgacgaggtgatcgcttcggccgacgaattcctgcgcatcccgatgtgcggcatggtcgagagcctgaacgtctcggcctcggcggcgatcctgatctacacgctctccgagcgcatgcgcctcacggtcggcaactggcggatgtccgacgccgaacaggccgaaacgctctgccgctggatgcggcgcagcgtgaaggattccgaagcgattttgcaacgccggggtatggtcccggatttataggcggcttcggcgctcctggcccgaatccgcgcaaatggataaaatagtatgattctccgcaaacaatttctggcgcatgtcgcccagacctccccgtcgccgatgctggtggaggtcgcgcgcgccgaaggctcgtttttctatacgcccgaaggcaagcgttatttcgacctcgtggccggggtttcggtcagcaatgtcggtcacggcaatccggccgtggtgcgcgccgtgcaggagcaggctgcgcgctacatgcatgtgatggtctacggcgagctggtcgagacgccgcaggtggagtatgccgccaggatcgcgtcgctgttgcccgcgccgctcgaaagcgtctatttcgtcaactcgggcgccgaggcggtcgagggggctttgaaactggcgaaacgttttacccggcgtacggagatcgtctccatgcgccgcgcctaccacgggtcgacgcacggcgcgatgagcatgatgggtgcgcccgagggcgaggagtggaagggggcgttccggcccctgctgcccgacgtgcaggccgtggagttcaacgatttctccgaactggagcgcattacgcgccgcacggcctgtgtgctggccgagccggtgcagggcgaggccggcgtccgtccgccccgtccgggttatctggaagcgctgcgcagacgctgcgacgaagtcggcgcgctgctgattttcgacgagatacagaccggcatgggccgcacgggccgcctgttcgccatgcagaaatacggcgtcacgcccgacatcgtctgtctggccaaggccttcggcgggggcatgcccctcggggcgttcgtcgcgcgtcacgaggtgatggacaccctgcaggaaaatcccgcgctggggcatatcaccactttcggcggccatccggtctgctgtgcggcgggactcgcggcgctgaattacctggtggacaacaaggtggtcgaaagggtcgaaacgaagggcgcgttgtatgaaatgctgctgaaggatcatcccgccgtgcgggaaatccgccgcagcggcctgctgctggccgtcgagctgggcgaatcggcgaaactttaccgcatcatggaactgttccgggaggcgggcatcttgagcgactggttcctgttctgcgatacggcgttccgcatttcgccgcccctcacgatctcggaggacgaagtgcgcgaaagcgccgcgctgatccgcagttgtctggaccggttgtaaaaacaaaagggaggcttcgaagcctcccttttctatgcctcttcggcaaacgccttcagtttggcgatctcctcgctccagcgcgcttcgtcgggggtttcgaggatcagcggaatgccgtcgaaacgcttgtcggaagcgatatagcggaagcattccatgccgatcatgccctcgcccagcggcgtgtggcggtcgacgcggctgcccagaatcttcatcgcatcgttcaggtgcatgcctttcaggtatccgaatccgacgacgcgttccagttcggcgaacgtggcgtcgcacgcctcgcgcgtccggaggtcgtaccccgccgcgaaggcgtggcaggtgtcgatgcagacgcccacccgcgatttgtcctccacgcgctcgatcagataggcgaggtgctcgaagcggaatccgaggttcgaaccctgccccgcggtgttctcgatcaccgccgtcacgccgtgcgtgcggtcgagcgccatgttgatcgactcggcgatccggtcgagcgactcctgctcggtgatcttctgcaggtggctgccgggatggaagttcagccggtcgaggcccagcagttcgcaccgctgcatctcgtcgaggaacgccgcgcgcgatttttcgagcggttccttctcgggatgtccgaggttgatcaggtacgagtcgtggggcagaatctgtgcgggcgtgtagccgtagcgttcgcacgcctcgcggaaggcgtcgatctcgcccgcggcgagcggtttggcgacccactgccgctggttcttggtgaaaagggcgaagccctcggctccgatagcgtgtgcgttggccggagcgttctccacgccgcccgcagcgcttacgtgcgctccgaaatatttcatagttggtcctttccgtttaactttcagacaaagttaaagtttttataaataaattcataaatttgtagattgaaaatcaaatacaatcgcttcgttatgaaacatttttacctgattctcacgctggcgtcactcgtcggggcctccgttccggtctcggcccagatttcaatcgacgaagtcaatgccgaacggcggaacgtgacgttccgcgaccggctgaagtccacgtccgtcgatgccgattatttcagcctcgcccgctacaaggccgagcgcgccgcaatccgcaaggagcgcaactacctcgaattgggcggcggcctgcagggaacgctgacttcgtacaacgatccctggatctcggtgtcgggcggtgacaactccattgcgctggtggcgaccttcaacctgcggcatatcttcaagaagaacctcttttccatcgaaaccaagttcaatgccaagctgggttacaaccgcatgaaggtcgagacgcagcgcgtggggccggacggcaagccgatggtcgacgagagcggcaacaagatcatggacagcgaaggcgtatggttcaagaatcaggacgagttcgtcatctgggtgaacccggcgttcgaaatggcgaagaactggacttacggttcaattctgcaattccgcagccagttcgtcaacggttacaaatcgcgctccgagcaggagaagaagcacctcaagagcaagtttatgactccgggttacctcgacatttcgctgggtatcacctacaaaagccctcaaaagaaattccccatcacggtcaacatgtctccgctcgccttgaacgccacctttgccgaaagcgactggatccgcatgcggcaggtcgacggcgacggcaaggagatcaaaccggcctatccctatggtatcgaggaccccgagaagacctcgaaatacgagggcggttcgtcggtcgagatcggtttcgaccgcacgttcggcaagacgggctacctgcgttacatcacgacgatcttctccttctacggctggattaccgacatcggccagaagaacaagatcagcgactacaccaagtacctggaggcctacgacaagtgggccgacaaggaagataccagcgtcgggcatgacatcaaggacaagccccgcctgccgatccatcccacggtgcgttgggaaaacacgctcgaaatcaaggcgacgaaatacctctccacgaaggttagtttccagctctactacaaccgggcgcagaacgtcgacgtgcagacccgtacgctgttgcaggtgggtctcacctatactttcaagaacaagccgaaaccctgataagttttaaataccgaaccggcgtctttggcgccatcatacgatgtacaaaaactcgaaacacaccgtcctcttcccgctgctgctggccgcgggagtcgttctgggcctcgttctgggccagtatctgggccgcaacaccaccacgtcgcagctcaagggcatgctcagccgcatggcgctgcccgacaacaaactctcctatacgctctcgctgatcgagaaccagtatgtcgactcggtgtcgatggactcgctcgccgaacacgtcattccgatgctggtcaaggagctggacccccattcggtctatatccccgccgcggaaatgcaggctctgaacgaacctctcgaaggggagttcgacggcatcggcgtggtcttcaacatggccaccgacacggtcatcgtgctgaacgtcattccgcaaggcccgagcgacaaggccggcgtcaaggccggggaccgcattgtcgagatcggcgattcgcttgtcgccgggcgtaagattccccagaacaacgtcgtcaaaatgctgcgcggaccgcgcggcacgacggtccgtctcggtctcgaacggcagggcatctccgatctggtcgaggtcgaggtcgtgcgcggcgtcattcccatcaggagcatcgaatcggccttccgcatcgccgacggcgtggggtacgtcaagctggggcagttcgcgcggaccactttcgacgaattccgcaaggcgctggcgtcgctgcgcgccgaaggggtgacgaaactgattttcgacctgcggggcaattccggcgggttcctcgatcaggcgatcgccgtggccaacgagtttctgcacgagggccagttgatcgtctacaccgaggaccgccgtcacgagcagctgcgcgaatacgccgacggcaaaggctcggcgcaggacatggaggtcgtggtgctgatcgacgagggaagcgcctcgtcgagcgaaattctcgccggagcgttgcaggacaacgaccgtggtacgattattggtcgtcgttcgttcggcaagggtctcgtacagcgtcagataccgtacagcgacggatcggccctgcggctgaccacggcgcgctactatacgcccacgggccgctcgatccagaagccctacacgatcggggatgacgcggactacgaggaggatctttggaaccgttaccggaacaacgagtttttctcggccgacagcatccatttcgccgactcgctcaagcgggtgacgccgggcggaaaggtggtctacggaggcggcggcatcatgccggacgtgttcattccggccgatacgaccgacgtgacgaagtatttcgtcgaggtggcgggccgcaacatcctctaccgctatacgatcgagtatgccgaccgtcaccgtgaggcgctcaatgcggtgaagaccattgatgagttgcagacgctgctcgacagcgacaagacccttgtggatgatttcgtccgctatgccgcccggaagggcgttgcgccgcgctatggcgacatcgcccgttcgcggaggctgatcgaggcccagctccgggcctatatcggccgcaatacggcgttggaggacaatggtttttacgcaaacatctatcccgtggacaacgtcgtcgtacgcgccatcgggatcttaaaggaggagaatgaaaatgattaaaaaactgatcggtattatcgtggctgtggcagtagtcgtcattatcgtcgttgcggccatccggcgcgacaacttccagtcgatggtgcggcgcgatgaattgttgaacggcgtcgagccggccgcggaacctccgcacctgatctcgcccgccgaactcgacgttccggccgaaggcgtcccggccaaggacgctccggctgcggggacggtcgattcgttgagcgtcgaaattacggattcgcttccgtaagccgggatcggtatgtatgcaacggcggccccgtaaggggccgccgtttttcgtgcgtcggggcggggcggtccgagagaaacggtcccgcagatctccgccagccggtttcgcgccggttagaagtatttgacctccgagccttcgatggccgaaagaatgttgttcgcggccgaagaggctccgatgcggaacaactccgtcgtgagccactctttgccgagtatctcctcgacgatcgtgtagtagagcgcggcgtcttcggccgtgcggaccccgcctgcggccttgaagccgaccttgcggcccgttttgtcgtagtagtcccggatcgcctggcacatcaccacggcggcctcgggcgttgcggccacgtcgatcttgcccgtcgaggtcttcacgaaatcggcccctgccagcatcgacagcagcgacgccttgcggatcaactcgggggttttcagcgctcccgactcgatgatcaccttcagcaccacatcgtcgtccatctccgtgcggatcacctccacctcgttggccgcctcgtcgtattcacccgtgagcatgcgccccacattgaggacgatgtccacctcgtcggcgccgttctccacggccatcgccacttcgagggccttcacttcgagaaaggtctgcgccgcgggaaatcccccgccgacgctcgtgatcttcatcggcgtgccgtccacggccagccccacggtctcgacgaacgagggatagatgcagatcgaagccacgttgggaatgtgggggtatttttggtagaactccgcggccttgcgggcgaattccgtgacggatttcaccgaatcgttgcacgacagcgtcgtgaggtcgatggccgagtagcagaatttgtagacctcggtgttgtggttgcgggcctctgcggccttgcggatgcgtgcgacctcttcgtcgacttgcgatgcgctccacgccggggcgtattctttcagatggttggcgtattccatacgatcgtgttttttacaaaattagaaaaattattcgatcccgcatcgtttccggatcaattattttaacggtgtccgacatcggccgccgcccggacgcggcaccggggatggcgccgggccgtttctccgaaaaacggatacacctgcgcttttgctgcggggcacacggggcaggatgcaaaaaaagagcctgaaccctctcgggccagactcttttttatccgatgaagccgattacttcttcagcgccttcaggttgatgtccttggcggccttctgggccagcgcgggattcttcgaaacagcgctcttcagctgggcctctgcggtcttcaggtcgccttccttggcggcgataacggcgcgcaggtagtcggcgtcagccgagttgtccttggcgatggccttcttggcgccggccaggtcgttcgactgaaccagggcgatggctgcgttgtagccttctaggttcttggcggcagccttgtagtcgccttcggcggcagccatggcggccttggcctgggcgtcggcggcagcggcgtacttcttggcctctgccgtgttgccgttagccaggttggcgagcagcaggttcttgctcaactccttcgacgaatccagcttggcagccttctcgaacgatttcagagcggcggccttgtcaccggcctgcgtctgggcaacgccgaggttgttccatacgcgggcgtcgttgaacttcttcgaagcggcggtcaggatggcaacctgctcctcggctccgttggccagctcctgggcggcatagaggtactgctctacggtcaggtcgccgccgttgcggtatgcagccatgatctcggcgtcggtcagaccctggaggtcggtgctgttgacgatctgcgagcggcgcagttcgggaaggatgtccttcttcaactcgttgaatacggtcgacatgttcttgatctcggtctcacgctctgcgggcgagttgtagaggctcaacacctggagaatgaggttcttgtccttgatgtccgacttctcgaccagctccttgaagccgtcccagtcttcgccgtaagcggcggcgtcgatgtccagaccggcgtccttgagcagcttggcaacgaccttcttacccgattcgctgcgcttcttcgaaagcgtgtcgttgaacttcaccggaccgtcgggcgaagcgtagcccttcacggcgatgttctgcgtggcgcggtcgttcgtgaggttcttgtccacgttctccttgaatgcgccgaggttggcgttcttctcgttcttcttcgtcacgaccgacgagttgatggcgtagagcaggtcggtcttgtcgactaccgtggtgaccttcttgtagttgttggccatctgatccatcaggtcgccgtacttgaggtccttctgcagggtgttcagaccgtaagctaccgtcaggccgaattccttggcgatggcagccttggcagcggcgtcgttgccggccagcacggcagcctgctccttggtggggatggcgccggtgttcaggttgacgagcacgaactccttggccttgcctttcgggcatttgatctcggcgcggagctgcagggcgcactggtccatgcggggatcgtacgggaactcgacgtgctgcgtgtaattgccgccgttgctcatgtctacgactgcatagttctcgtctaccttcgaaccctggtagtattgggtggcgccggccacttcgccgccttcgaatacgatgacgggagtaactttgatgatggctttcttgttgaaatactcaacggggaaggttacattgatgtctgcggcaaccgtgccgttgttcagcgtcaggatctcgggggtgaccgtcagcttgatgtcgtcccggttcttggccatcttcttgaagcagttgcaactcgagaatgccagtgcggcagctacgagcacaacgctcaatttcattaagtttttcataataggtaaaagttaatgtgtttattttgaatttgtttgcctctttcgttcgttccgccgcctctctgtccgcccgctgtccgttcttcgttgtccgtccgtgcaggcgcttgccgggctgcggaacagtgcaaatatagaaaactcttgctgattatgcaatattccggacggaaatcaacgcttttttccgtccgaaatatccacattaacagtctttttattcctctttgtgctcgtggcgctcccggcgttcgccgcggtcgcggcgttcgccacgctcaccgcgctcgggacgcgggcggcgctcacgctccacatagccttcgggcttgggcagaagcgccttgcgcgacagtttgagcttgttggtcttggggtctacgccgatcagcttgacgtcgatctcgtcgccctctttcagacccgtctcctccatggtctcgaagcgcttgtagtcgatctccgagatgtggagcagggcgtccttgcccggcatgatctcgacgaacgcgccgaaggcgacgatcgagcggactttgccgtggtacgtctcgcccacttcggggatggctacgatggccttgatgcgggccagcgctccgtcgagggcctccttgtcgatgccgaagatgtccacgatgcccttgttgtccacctccgtgatggtgatggtggtgttggtggtcttctggatgtcctggatcacctttccgcccgggccgataaccggaccgatcatatcctgcggaatgacgatctgcacgatgcgcggcacgcagggcttgtagtcctcgcgcggctcggcgatgcactcggtgagtttgccgaggatgtgcatgcggcctttgcgtgcctgctccagcgcggcggccagcacctcgtaggagagtccgtcgaccttgatgtccatctgcgtggcggtgatgccgtctttggttcccgtcaccttgaagtccatgtcgcccaggtggtcctcatcgcccaggatgtccgacagcacggcccatttgccggtttcggaatcggagatcagccccatggcgatacccgacacgggtttgcggagcttcacgccggcgtccatcagcgcgagggttccggcgcagaccgtggccatcgacgacgagccgttcgactcgaggatgtccgacacgacgcgcacggcgtaggggttgtcctcgcccagcggaatcatcggcttcagggcgcgccatgccaggtggccgtggccgatttcgcggcgcgagaggccgcgggcggccttggcctcgcccgtcgagaagggcgggaagttatagtggagcacgaactgctcggtaccctgcacgagcacctcgtccttgaccttttcgtcgagtttcgtgccgagcgtaacggtcgtcagcgactgcgtttcgccgcgggtgaagatcgccgagccgtgggctgcgggcaggtagcccacctcgcaccagatcggacggatctcgtcggtcttgcggccgtcgagacggacgccttcgtcgaggatcatgttgcgcatggccttcttctgcacgtcgtcgtggaaatatttgtggatcagcggcgccttctcgatcagctcctcttccgaatagcgggctgcgaactcggcttcgagcgcgttgaacttgtcttcgcgctcgtgcttcatcgtgccgctcgtggcgatggcgtaggccttgtcgtaaagctctctgatgatcgtctggcgcagttcttcgtcgttgacctcgtggcagtaggtgcgtttcacgtccttgcccaactccttcgacagctcgatctgtacggcgcagtgcttcttgatctcctcgtgcgcgaacttgatggcgccgagcatcacctcttccgaaacctccttcatctcgccctcgaccatcaggatgttgtcgatcgtaccgccgaccatgatgtccaggtcgcattcgggcatctccgaataggtggggttgatggcgtattcgccgttgcggcgtacgacgcggacctccgagatggggccgccgaagggaatgtccgatacggccagcgccgccgaggcggccagaccggccagcgcgtcgggctgaatatccttgtccgccgagatgaggttgaccgtcacgtagacttcggcgtggtaatccgcggggaacaggggccggagggcgcggtcgatcaggcgggcgacgagcacctcgctgtcgttggcgcgcgcttcgcgcttcatgaaaccgccggggaagcggcctacggcggcgtacttctccttgtattcgacctggaggggcatgaaatcggtgtcgggttttgcatcctttgcggccacgacggttccgagcagcatcgtgtcgcccatcttgacgacgaccgagccgtcggcctgcttggccagtttgcccgtctcgatctcgatctggcgaccgtcggccagcgtgatgatcttgcggactgcgttgtacagcttcttttcttccataaaaattttaaacctataatgttttcgaattgtttttcgcaacgaaaatgaaggcaacccctctcgggaattgcctccatttcttcctcgggactacttgcggagattcagcgtcttcacgattgcgcggtagcgctcgatgtcgacctccttcaggtattccagcaacgcgcggcgcttgccgaccaggcgcagcagtgcgcgctgggttccgaagtcgtgcttgttgcttttgaggtgttccgtaaggtggctgatacggtaggaaaacaacgcgatctgactttcgggcgaacccgtgtcggtgttagacttgccgtactggccgaaaagctcctgctttttctcagctgttaaataagccattgtgtaaatttattttacgttccactctacgacgcatcccccttaccgtggataacgccagagcgttccgcaaaggtacgaaataattcataattcataattcataattcacaattattttcaatttggcgtctaaaaataacaaattaatcgagaaaatcgtatttttgcggctaaacaagtgaaaattatggggaaaacgggtgtgcgcggaactttcgccgcgcttgtcgccgcggtgttgtgcggctgcgggagcgagccggatttcgtcaccgtcgacgggacgatgctcggcacgacgctgcatgtggtggccgacgtgaagggcgtctcgcggcagcgtctctatgcggccgtcatggagctggaccgcgaggccaaggcgtcgatgtcgatttacgattcgacgtcgcttgtgagccgtctgaaccgcaacgagaccgacagcgtcgaccgtcatatcgccttcaacctgcatctggccgacagcatcggcgcgttgagcgacgggcgttacgacgtgaccgtcaagccgctggtcgaggcgtggggcttcgccggccgggagcgcgtcgaaaacccgaacgtcgattcgatcctcgaattcgtgggccgcgaaaaggtccgtgtcgagggagggcggctggtgaaggacgatccgcgcgtgcagctggacttcaactccgtggcgaaaggctatacggtcgatctgctggccggactggtcgagaaatacggggctgaaaactacatcgtcgacatcggcggcgaggtccgctgccggggactcaaccggcagggccgggcgtggcgcatcggcgtcgaaacgcctttcgacggcaacatgtcggacggtgaatacctccagaaacggattcagatgaccggcggcgggctggccacctcgggcaactaccgccgtttctacctcgacggggagggcaacaaggtcgcccacaccatcgacccccgcacggggcgcagcgccctgtcgcgcctgctgtcggtgaccgtcgcggctccgacctgcgccgaggccgacgcgctggggaccatgtttctggcgatgggcgccgacgatgcgctggcggccgtggaacggatgcccggcgtgaaggcgtacttcatcctggcgggtgacggcggagagtacgaggagtacgtctcgccggccatggaagcgttgattctgaaatagcgagataaatgaaaacagcggtattcctctacaatcccgaatcgggcaagggcaaaatcgcccgcaacgtcgggtgcatcagtacgatttttcaggcctacggctacgacgtcacgccgcagcggatcgactttacggccaatccgttcgacggcaacgagaccatcgacctgatggtcgtcgccggcggcgacggcacggtgaactatgcggtcaacgccatgaaacgcaaggggctggacattcccatcggcgtgattccggccggtacggccaatgatttcgccggggcggtcggcatgtcgcgcgagccgctcgaagcggcgcggcagatcgcttcgggggctgtggaccgggtcgacgtaggccgggtgaacgacctgtatttcgtcaatatcttttcgttcggaatcttcacgaccacctcgcagcgcacgcccgacgaacgcaagcacaagatcggcaagctggcctatatcatcgagggggtcaaggagttccgcacgatgcacgccgtgccgctggagatcgaggccgacggcgagcggttcgacctgcggtcgctgatggtgctgatcttcaacggcgagacggcgggcggtttccacctggcgcggcggtcgtcgatcaaggacgggctgttcgactgcatcctgctggagaagaagaatttctttcgttcgacgctggccatgtgccgctatctggcgggcggcagcccgaagatcgtccgccacctccgggcgcggcggatcgacatccgttcgtcggtcaacgaacccacggacgtcgacgggcagaagggcgccgaattcccgctgcacatcgagtgtctggcgggcggcctgcgcgtgatgtgcgccaaacaggcctcgggcaatttctgatttttacggtccggcttgtttgattctgcgaaaattcatacttttgtcggaaaaattacgacgatatggcggataacggcaaaacggcgcgcagcggaggacgcgaaagtttgcgcaaggtctccatctcccggatcaagaaggagatgagtgacgtcttttacctttcggacgatctggtgatttccgcactcacggccgacaagaatactacggccgattatccgacctcgatcgacggctttacggccatcattatgatgacgggcgaggccaccgtgtcgatcgacatgcagaattacagcatcaagcccaacacgatcgtctttttcaaccccgattcgatcatccgcacaatcaagtgttcgtcgaacgccgcggcctacctgctggccttctcgaaatcgttcgtcaacgagatccagatcgacctctcgacctcgctgccggtctacatgcgcttcggcaaggcccccgtgctggaggtcacgccgcaggacgtggacgaaatccgccagttgttccagctcatcaagaccatgctgcgcagcgacaaggagcgttaccgccacgagatcatccgcacgctcttcaccacggcgttctacatcatcaccgagatcaaccagcgcgagcagcccggcgagatgaagcaggggcgctgcgaggtgctgttcgacgagttcatgtcgctgctgcaacagtacaacaagagggagcgcaacgtgagcttctacgccaagcagctcaatatcacgcccaaatacctctcgtccgtggtgaaggaggtgagcggcaagaccgccgcgcggtggatcgacgagtcggtgatcctcgaagccaaggccctgctcaagtattccggaatgagcattcaggagatcgcctaccacctcaatttctcgacgcagtccttcttcggcaagtatttcaaacagcacaccggaacctcgccctcgcgttacaagcggaaaggatagttttcgattttacagggcctcttccgtcctgccttgtccggcccgaacggaaaatacgtttgtatgtcccgtccgggtcgaactgtgtcaggataaaatccgctcctctaaaatcaaaaaaccgaaccttgtttttcaggtggcggctcgcgggtgtccgctatgacacgccgctatttcagcgcttcgaccacgcggccgatcatcgccgggatggcgtgctcctcctgcgcggtgaagaaattgccgtcgatttcgaacggggcgtccgtcgccacggggcccgtcacggcggccttggccatcgggtgcacggcgacgcgccgtccggcggcgacgcctgcgaatccgaacatcatccctgcggcgcagtggccgatcatcggtttgcccgtctccccgaaggttttcagcacctccatcaggtccctgttccaaggctcgccggcatgctgcgcgaagaccggcacggcgtcgccgcaggcgaacaccagagcgtcgtactcctcttcgtgacccttgaggttggcgatcacgtcgtcggccgtcaggccgatgcccgagttggtgcggatctcgcggctttcggccacggcgaacacggtgcagggaatcttgttttcgaaaaacgtttccagatactggaacaggcccatcccgttcacgggattcacggccacgacagctgctttttttgccatgattgcaattcgtttagtgatacaatggttattttcggtaagtttgttatctttgcgtacaaagatagggcaaacagcccgtaaaaacaataacgcacttaaaaatgagatggttacatacgtgtaaccattgctggataccaaacggatggagccggagaaaaaattgaaaaatttcacgcccacgggttcctgcccggtccgggacgtgctgtgccgcctgggggacaagtggtcgatgttggtgttgctgacgttgaatgccaacggcgtgatgcgtttcagcgagatccaccgcacgctgggcgacatttcgcaccgcatgctgaccgtcacgctgcggatgctcgaaaccgacggaatgatccgccgcgaagtctacgccgaggttccgccgcgggtggaataccgtcttacggagcggggcgggagtcttctgccgcatattttcggactggtggaatgggccgaggcgaacaaggaggctattctggacggccgcaggaggtcttgaacgacatccgccgggcgtccgtgccgtcggggtagtagccgcgtagcagttttccggggcggaagccgttgcgggcgtaaagccttatggcagagtcgttatcggtgcgcacttcgagcgtcacttcacgcagtccgagccgccgggccagcgcgatagcggcgtccagcaacgcctgtccggctccgcagccgcgcgccgcggggtccaccgccacggagtagatgcggaggttttgcgccgtgcgccgcatcagcaatgaaatgtagccgacgaccgcaccgtcgcgggtggcggcgtaggacgctccctgcgcatgcgtcagcaggtagcgcagctgccgccgcgtgaaggcctccccttccgggaatgaacgccgctcgacgcactccacggcgtcgaggtccccggccgtcgcgggacgtattccgactgcggggttcattgcgcgtggaggcggttgaggcagtggacgaagtggttgaggatgcggtagtaaagttcgtcgcccagcacggcgtcctcgactttgtggtcgatcgacgggttgtcgttgatctcgatcaccacggccctgccgttgatgagtttcaggtccacgccgtacaatcccttgccgatcagcgccgcggcctttacggcggtgtcgagcactttctgcggcgccttgtagatgggtacggtctcccatgcgccgcacaggttgcggcctgtgtcgtcgtgggcgtggttgtagatctgccagtggcccttggccatgtagtatttgcaggcgaacaacggttcgccgtccaggaggccgatccgccagtcgaactccgtggggatgaactcctgggccagcagcacggacgagtggcggaacatctcgtcgagcgccgcgcgcagctcttcgtcgctggccaccttgtgcatgcccaccgagaacgatccgtcgggaatcttgaggatgaagggcgcgccgaggcgttcgctgatctcgccgaaggagtattcgttgctgcggaacagcagctgcgaggccggggccgggatgcgggccttttcgaaaagctcgcagaggtagaccttgttcgtgcagcggatgatcgactcgggatcgtcgatcacggcgatgtcgttcatcgcggcacgctgcgcgaggcggaaagtgtagtggttgagcgctgtggtggcgcggatgaacagcgcgtcgaactccatcagccgcgtggcttcctcctcggtgatcagctccgcgtggatgttcattttccgggccacttcgaggaacttgttgagggcgtccttgtcgctgggcgggaatttttcgtccgggtcgtagaggatggcgaggttgtagcgtgcgggcttggccgagcgcggcgagcgccataccttcttgttgaagcagtcgagcgcattggcgaaatcgtcctgcccgctctccgagagctggcgcagcgaaagggcctgcaccgactcgatctggttgcgggcgtggttgttcatcgtcacgcgcaggatcgggcaggggtagtggtcgaagatgaaccgcgcgatcttctccagacccttctcgcggcaggttccgaagtagatgttcagctgccaggtttcgtcggtgatgcggttgcgttcgatccactgttggcagagctgttgcaggttgcggttcatgcggattccggcgcccgattcgagcttgttgagcgtctcgacgcccggcagcacccggtgtccccgggcctgggccagcagcgagcagtagtagccttcggagttgtagccgtattcgtcgctcaagttgatgaccagcttgggcgtccgctccccgtaacggtgttcgaggtagtcggtgacggtcatcagcgaatcggtttcgcagtagggtttccagtcgttgaggctgttcagcaggatgaagacgctattcatgcatgtgtgttttcgatgcgccaaatgtaagcaaataaagcatccgttgtacatgccgcgcgccgttttgcgaaataaaaaaacgggcctccgcagagacccgttttctggttgtccgtcggggcgtcaggcccgttttttcgccgccttggcagccaccgccttgtccagctcgatgatgaagtccgagaggacgttcatgtagttgatgaaggcgtcgtaggccgaatcgtaggggttgaagtaggagtgcacgtcgccgtccgacagccacttggtggccatgtagtagaaatggtcggaggtctgcatgaaactccagacataatcgaaatcgggatttttcagcgccgcgaccttctccttctgggcatagagcttcgagaaagcctcgttctgcaattcgttgcccagccaggccgtcacgtcgcgctcctcgtcggcccacgacatcacgtgcggacagtggagcacggcgacgggctggtgcttcttcgcggcctcggtcaccgtggcgaactccaggccgttcttcctggcgaggatcgccttgggcagcgcgcgcatgaattcgaagatgcccgtgtcggcgttctgatgctcgccgaaggtctcgtaatccatgaacaggttgatgacctcgcccggcgtctcgtccgaggcgagccactgcacgtacttgtcggctgtcaggggccactggtcccagctcttgttcgagaagcggaaagcgatgtcgtccgagagtttgtagttgcgcagcagcaggcgcagtttctggtcgatggcgttggcgtagacgtagttgggcgatttccaccccagcacgtgcttggctccttcggccagcatcgtgcggaagcccatgccggcgaccatcgcgccgatctcgtccgaatagatcagctccgtgttgcggaaagcggtgggtttcatcccgaactcctttttgataaggttcgtgtgcagtttgacctgctccgtgaaatcctccttcgaagccagcgaggccagcgagtgggagtaggtctcggcgaggaactccacgcagcccgtcgcggcaagctccttgaacgagtcgagcacttcgggggcgaaggcgcggaactgttcgatggcgatgcccgtgatcgagaacgaacagcggaacttgcccttgttctccctgatgagcttgagcagcagggcgttcatcggcaggtagcactggcgggcgaccttctgcatgatcgaacggttcatgaggtcgtccaggtagttgtggtccttgcccatgttgaagaagcggtatttcttcagacgccagggctgatgcacctgaaaataaagacagacggttttcatgcgggttgctattttaattgtttcttattctcttcgatcacggcttcgtacaccgatttgatcttcgccgcggcgtcgttccacttgaggttggtcacctcttcgagacccttcgaggcgaacatgcccgacagggcggggtatttgatcagtccgtagatggcgtcggccagggcgtccacgtcccagtagtccaccttcacggcgtagtccagcacttcggccacgccgctctgcttggagatgatcaccgggacgttcgagcgcatcgcctccagcggcgagatgccgaaaggctccgagacggagggcatcacgtagacgtccgacagctggaacatcttgtgcacgtcctccccgcggaggaaccccgtgaagtggaaacggtcggcgatgccgagccgcgccacgcggcggatgacgtggttcatcatgtcgcccgagccggccatcacgaaccgcacgtcgggaatccgcttgaggaccttggcggccgcctcgacgaagtagtcggggcctttctggtaggtgatgcgtcccaggaaggtcacgaccttgtcggtgacgccccgctcgggaaccttgccgctgttctgggcgaagcgcacggcgttgtgcaccgtgacgatcttttcggcgggaacgccgtagcggttgatgacgatgttgcgcgtgaggttcgaaacggcgatcacgcggtcggcggcgtgcatgccggcccgctcgatggcgtagacctgcgtgttgacgttctcgcccgagcggtcgtactccgtggcgtgcatgtgcaccaccagcggcttcccggagacgcgtttggcggcgatgcccgcgtagtaggtgagccagtcgtgggcgtggatcacgtcgaactgtccttcgaggtccctggccacctgcgcggcgaccacggcgtagcgcgccacctcctccatgaggttggcgccgtacttgcccgagaaggtgtagcgctgtttccaggcatcggtcgtcgaccaggtcttccgccccgacttgacgtactgctcgtggtaggactcgtactcctcgggggagatataggggaccatgttcgagtcgatgtggatgaacgacatcttctccagaatgtcgtccgcgccgctgcccgtcgaaccgtacaaggcctccacgtcgctggcgttcacgacgtgcgtgaaacgctggtcctcgtcgccgtaggcgtgcgggacgatgaaagtgacgtctacgccgttgcgcgccagtccgcgggtcattccgtagcaggccgttcccagcccgcctgcaatgtggggcggaaactcccatccgaacattaaaactctcataccttatctttttgttgtttcattttgccgcctgtgcgcttcctctccgcatcccttcacggcgcccggccgtgtccgtaagtcagattccgcttcgaacccctcccctcggaaggagcctcgccatccggcacaactctctttcacattgtgcgcccgggccgtattcgttatttcgttttttccgtcgttttcttcttcgttgtctttttggcggccgtcctcttcgcggcggcctttgccgcgggtttcacggccttcgcggccttcgcggcaaccttctccttaccaacgttttttgcggccttcgcagtcttcggattcgctttttttgtgggtttttccgactttccgggcgtctctttcggtttgcgtgcgaggatcatgccgtagatgtccagcacggccgcgacgctccacgcctgcgaaatggctccgcgcggcgcgaacggaggatcggcgtcgaacagttcgccgatcgaaccgatgccgtaggtctggatgtcctcctcgaatccggcgagaatctcctcggcctgcggcagaaaggcgtcgccgtcgatgtcgaagcaggcgctgacgtagaacgacagcagccacggccataccgacccgttcttgcccgcgaagtcgcgttcggcgggcgtaccctcctgcgaacccttgtaaagcgggttgcggggcgagagcgagcgcaggcccttcggcgtgaggaggtgctgccgcactgtgcggatcacctccagctgggtctgctcgtcgagcatcttgtagggcagcccgcaggcgacgatcatgttcgggcggatgtccgtgttggcgccgtcgcagcccacgcagtcggctaggtagcctttgggcaggcggaagagttcgttgaacgacgccgcggtgcgttcgggcagtttctcccacgccttcacgaacttcgtgtcgcccgcctcgccggccagccggagagcgtagcggacggcgttgtaccacaaggcgttgacctccacctgatagccgttgcgcggggtgacggaacggccgtcgatcacggagttcatccacgtgaggggaacctcgtcggacgaggcccacaccagcccgttgtcgttgagcgcgacacggcccgcgacgccccgtttgtacgactcgagcacctgcttcatggcctcgccgtagtgtttccagatctttttcgcgccgatctgcgcttcgagccgctgaagggtccagaagaaccacagcggggcgtccgcggccgctgccgccgaagcgttcccggcgaacatgccgtcctgcatgccgcgcacctgcgtgtcgagggcgtcgatgcagtcctccttgtggttctgccacagggtgatgcccggcagcgagacgaaggtctggcggcccgaaaccccgtgccacggatagcccgagaccacctccgtccggttgcccgggcggcggatcacgaactgccgcgccgagtgttcgaggcagctgatgaagtcgatcttgtgcgtgcggcgcgcgatggagccgccgaagacctcctcgatggttttcgtcgagcccatttcgtcgagcgacgccgagaagatgatgctctcgcccttcttcagctcggtttcgaaatagcccgtggtcatcaggtcctcgtagccgtcgtagccgcgggcgatgtcctgccggtattcgaaattgtagtaccagtcgggcgcgggcacgaactccgcgccgggtttgctggtctggagatacagccacggaaacgaaccgtagaggcggcatttcacgccgttgacggccggataggagtgcccgtcggcctccatgttggcatgcgtcagcgcatgcttgtcgcggaaggcgaggaacgggcgcagccggaggcgcgtttccgaatgggcgtcgacgagcgtgtagcggatcatcagttgcgtgcgcttgtgaatccagagcatctccttcttgaggatcacgccgcctacgcgataggtgatcgttggggtcggagtgtactcgaaatcggtgatgtacttgtggccgcgcggctcgtaggtcccctggaaacggtgcagcgccaggttgaacgtctggtcgtgctggatgatcgtttcgtcgagcgccgacaacaggacgtaggtccggtcgctgtcgtcgatcggggccaccatcaggccgtggtaacggcgggtgttgcagcagacgatggtcgtgctcatatagccgccgatacggtccgttgcgagcatttcgcgctggagcgagtactccagattgcccaattcgcttttgtcgaaagtaagtgctgacatatcgctaaaaaatacggttcgtcctttaaagatattgaaattttcgaacagttacaacttgttattgttaattattcaaatttaataccttctattggcattaggcccacttcaccagcgcgaagtccatgcggtggggcaggagcgggttcgaggggtagatgcgcagcgccacgtcgaacgtgccggcttcgtcgggcgtgtagtcgagcgagtaggtgacccggcttccgtcggccttcgtgcgttccagctggatcgtgcgggtgacgttgacggactgtccgccgacgatctgccgcgcgacgaccatctccacgccgatgtcctcgggccgaaggttggcgatgtcgagcgtcacggcgaactggtacttctcgccgacgcagacggcttccttgtcgatcttcacgcgctgcacgtcgacgatgcgcacctggtcccatgcggcggagaccttgcgcttccaggccgcgatctcgcgggccatgcggtaggcctcggcgctcatctcgcgtttgcgcgcggcgagcttgtcgtagaaccggttctcgtagtcggtcagcatgcggttggtcgtgaagttcgaggcgatgtccgccacgcacctcttcaccgacgaaacccactcgtgcgggatgccgtccgtgtcgcgggcgtagtatttcggggcgatctgctcctcgatggtgttgtagatcatctcggcgtcgagttcgtcctggtagtgctggtcggcgaaggtgcgctccatcggaagcatccatccggcgccctccttgtagccctcgacccaccagccgtcgagcacggagaattgcagcacgccgttcatcacgcacttctcgcccgaggtgcccgaggcttcgagcggccgcgtgggcgtgttcagccatacgtcgacaccctgcaccatgcggcgggcgagttccatgtcgtagttttgcaggaagaggatcttgcccacgaactgcggcatggcggccacctcgacgatgcgccggatcaggtcctgtcccggcttgtcgttggggtgcgccttgcccgcgaagatgaactgcacgggacgctccttgttgttgacgatcgccgccagacggtcgaggttcgtgaacagcaggtaggcgcgcttgtaggtggcgaagcggcgtgcgaaaccgatggtcagcacgtcgggcttgatgccctcgatgacctgaagcatctggcgcggcgagtcgaggcgcacctgccgggggtcgctgtaacgccggcggatatgcttgatgagcttgttcttgagcttcatgcgctcctcccacagctccgcgtcggggatgtcgtggaccttctgccaggccgggatgtcgtagacgtggccttcgaatccgtcgccgaagtaacgggcgtagaggcggcgcagcgacgaggcgatccacgtcgggaagtgcacgccgttggtgacgtagccgatgtgcagctcgttcttgaagtagcccggccacatgttgcccaggatctccttcgagacctcgccgtggagccacgaaacgccgttgacctcctgcgagaggttgcaggccagcaccgacatcgagaacttctcgttggggtcgttgggattggtcttgcccaggttgatatactgctcccaggtgatgcccagcacgtcgggatagtgcgacatgtactggcggatcatcgactcggggaatgcgtcgtggcctgcgggcacgggggtgtgcgtcgtgaagagcgacgacgagcgcaccacctccagcgcctcggagaacgagagcttgcggtggttcaccagatcgcggatgcgctcgacgccgatgaatgcggcgtggccctcgttgcagtggaacacgtcgtgcttgatgcccagctgacgcagcgcgcggatgccgccgatgcccagcaggatctcctgcttgagacggttctcccaatcgcctccgtagaggtagtgggtgatctggcggtcctcttcgaggttgtcctcgatgtcggcatcgagcaggtagaggtccgtgcggcccacctggcacttccagacgcgcgccgagagcgtgcggcccgggaaggcgatggtgaccgtcacccagcctccggcctcgtcgcgcacgggcgagatcggcagtttgtagaaattctgcgcctcataggtggcctcctgcgcaccctgcgccgaaaggcgttgggtgaagtagccgtagcggtagagaaggcccacggcggccatcggaacgttcttgtccgaagcctccttcaggtagtcgccggccaggatgcccaggccgcccgagtagatcttcagcgacgagtgcaggccgtattccatcgagaagtacgaaaccgtcgtcgccttcgggtcgggcttctcgttcatgtagtcgcggaactgcgtgtgcacggcgtcgagctgcgccaggaagttcgtgtctttctccagttccttcatccgctcgacgctcatcttgtcgaggaaggcgatcgggttgcggtccgattcggcccacagtgcggggtcgatgccttcgaacaggtcgcgggcgccggggttccagcaccaccagaggttgcgcgaaagctcttcgagggcgtgcagccgcttgggcagcgtcttgtcgaccatcatgcggttccagacgggtttctcgacgaaaagctgctggcgcacgaagttgatctgctcggttttcgtgccgccgtcgagcacggcgcggttggtgcggacgatcgaactctcgaccgcctcggagtaggcctgttcgtaggccgcgaagaggtgctcccagagcgccgtcagcgagatttcataggccgaggtgtgctgttcgttgacgtgtttttcgtccagcaggctgaaacgcagcagcgtatcggcgatcttcgcctcgacctccttgtcgttgtagtcgtcgcggcggatgacctccacgccggcgtgctcgcgctgcttgtcgacccagatgccgaacccggccagcgtcgtggtgaccgtcgggatggagaaggccaccgactccagcggggtgtagccccacggctcgtagtaggaggggaaaaccgtgatgtccatgcccacgagcagttcgtagtaatccttgtggaagatgccgtcggccttgttgaggtacgtggggacgaagatcaccttcaccttcgatccgggatcggtgaggttgctgttcttcagcgcgttcacgatggggtcccacgtcgcgttttcaaggtagtgggtcgaatgtctgtactggcctgcgtcgatgggcttcgacgggtcggccagatgagcctgcaaatcgaggcgcgggccgcggttgccggccggcacggtgatgtaggccagcacctcgcgccggagacggtccgaggcggcgagctgcttgagcgactcgatgaagacgtcgatgcccttgttgcggaattcgtagcggccgctggttccgacgatcagcgggtcgcccgtgaatttttcgcccaggcaggcctcggccaccgagatcatcgcccggcgggcttcgtcgcgtttggcgtagtactcctcgccggcccatacgaagtcgttctcgaagccgttgggcgtcacgccgtccggttcgcgccccagcaggtatttgcattcgttggccgtgatgtcgctcaccgtcaggaatgcgtcgtggtaggcggcggccatcttctcgatcgagtgtttggccgtgacgttgaactggcgcgccagctcgtcggcgttgaatttcgggaggtcgttgtagagcggcaggcggttgccggcgatgcagcggcccatgaccgtggcgtgggtggtgaacaccgtggcgatgtagggggcgtgtttgcgcaggtacagcccgcccgcggcggtcatccactcgtggaaatgcgcgacagccttctcggtcggcgtgccgaaggtctcgacgtaggaggcgatcacgacgcctgcggcccatccgaacagcaccggctcgatgtagtcccactggcccgagatcgagtccacgtggtacaattcccagaggcttttgagtatttcgtccttgcgggggatcagcgacgagaaatcgaccagcaccaccgtcggctcgcccttgattttccagcggccgacgcggacgcggatgccttcgttgtagaggctctggcgccaggccttcagcagattggggtcctcctcgaactccgggttgacgccctcgtgcgagaggtcgggacccagcaggacgtagcggtctgcgaatttgcgggtgacggtctgcgctttggtcgaaatgacggtgtggatgccgccgaccttgttgcatacttcccaacttacttcgaacagcaaatcgggggagtgtttggcattgctcatatacttatgctaatttgtaattttcgtgacgaaccgaagaagaattcggccgcaaaggtaacacttatatttatattaaacaatcgggagtggatgtttataaaaatatttaataataacttaacatttcagtttcacttggttgcggtgtccggttccgtttcgaaaaacgtttcgatcaccgcgtcggagaccagcatccgagccggcgggacggccatccgtcccgctgcgagaacgagcgtgcggctcttcagccacggttccgcatcgcgcaggacccgtgccgcgcgctccttgccgaacagtctttccgcctcccgcaggtcgatgccttcggccgtgcgcagccgggtcatcacgtattcgttgaagcggtcgcggtcggtgagggtttccgcttcggcgggcgcgccgccgatgtactccgtcaccgaggcgacgttccaatggcgttcccggccgtcgaacgaatgggctgcgggaccgatgccgaggtacttcacgccgtgccagtaggccgcgttgtggcgggcgcggaagcccggcagggcgaaattcgaaacctcgtagtgctcgaaccccgctccggtcagcgtttcgtgcacgagggcgtattccgtttcgctggtggcttcgtccaccggggcgaactgtccgcgggcggcccgccgtccgaaggccgtaccgggttcgacggtcaaatggtatgccgaaatgtgctgcacgcccagcgcgagggcgctgtcgagcgagcggcgcagcgtgtcgttcccgaaacccgggacgccgaaaatcaggtcgacggtgatgttttcataaccttcgtgctgtgcgctccgcacggcctcgacggcttgcgcagcgttgtggcggcggttcatcagcttgagacacgcgtcgtcgaacgactggatgccgaccgacaggcggttgacgcccgcgcggcgcagcacggcgaggtaggcgggggtgaggtcgtcgggattggcttcgagcgtggtctcctccgccgcagtgcaatcgaacagcgtcgcggcatggtccagcagccccgcgacggcctccggggcgcacagcgagggggtgccgccgccgaagtagcgggtgcgcaccggctcgccgcccagatattcccgccgggcgtccagttcgcggtgcatggactccagaagagggtccatgcggcgcaggtcgacgcttttgtagaagtcgcagtaggcgcagacgcgcttgcagaagggtatgtggaaataaagtccggccatgttatccaaagatacgaaaaagacggatgactgcaaaacggaatcgcatccggttcggaaaatttttccggctgcggctccgcctccgcccgcgggaggccgggaagtcggggcggcgcttcttcattttcagcgcgatgctccccgtctgtcgcccggaacgcacggggcggcagcgggcagagcgtcggagtcgtttccggctgtgttttcatggagggccggcggttgcggggcggcgggaaacgtgttccgggggagggctgtttccgggcggaaaatccgcgctcccccaaaggtgataaaaaccggcggaagaaaaccggagcgtcccgtccggcgcggataaattgcggcaaaatttttgccgggcgatcctcgcaagggtttgcgaagggcttttcggcggcgttgtacgacgctatcaatgaggcgtatagcactatcggaaaaaataataaatattttttgtaatttcggctgttatttttttcacaattatgaaagtttttctacctttgtgccgttgaagtccggacctgcggactgaaacgtcaggttgaaaagaggattttaatcaaataaattgcaattatggacaaaatggatctgaaaaagtacgggatcacgggcgtgaccgagatcgtgtacaatccctcctacgacgaactgttccgtgaggagacgaaaaaaggcctgcgcggctatgagaagggtcagctgaccgagaccggcgccgtgaacgtgatgaccggcgtttacaccggccgttcgcccaaggacaagtttttcgtgatggacgagaccaccaaggacacgatctggtggacttccgacgaatataagaacgacaacaagccggttacgaagaaggcctggaaggagctgaagaaaatcgccgtcgaggagctttcgggcaagaaactcttcgttgtggacacgttctgcggcgccaacgagaactcgcgcctgaagatccgcttcatcatggaggtggcctggcaggctcacttcgtgaagaacatgttcattcgtccgacggacgaggagctggagaattacggcgagcccgacttcgtggtgctcaacgcttcgaaggccaaggtgaagaactacaaggagctgggtctgaactcggagacggccgttgtcttcaacctcaccgagaagatgcaggtgatcatcaacacctggtacggcggcgagatgaagaagggcatgttctcctacatgaactacctgcttccgctgaagggcatggcttcgatgcactgctcggccaacaccaacgagaagggcgagaccgctatcttcttcggcctgtcgggaaccggcaagaccacgctttcgaccgacccgaagcgtcagctcatcggcgacgacgagcacggctgggacgacgacggcgtattcaacttcgagggcggctgctacgccaaggtgatcaacctctcgcaggagaacgagcctgacatctggaacgccatccgccgcaacgcgctgctggagaacgtgacggtggacaagaagggcaagatcgactacgccgacaagtcggttacggagaacacccgcgtatcgtacccgatcttccacatcgagaacatcgtgaagcccgtatcgaaggctccggccgccaagaaggtcatcttcctctcggccgacgcattcggcgtgctgcccccggtttcgatcctgacccccgagcagacgaagtactacttcctctcgggcttcaccgccaagctcgcaggcacggagcgcggcatcaccgagcctacgccgaccttctcggcctgcttcggcgcagccttcctgtcgctgcaccccaccaagtacggcgaggagctggtgaagaagatgcagaagtcgggcgccaaggcctacctcgtgaacacgggctggaacggaaccggcaagcgtatctcgatcaaggacacgcgcggcatcatcgacgcgatcctcgacggttcgatcgacaaggctccgaccaagaccatgcctatcttcgatttcgtggttccgaccgtcctgccgggcgtagaccccgctatcctcgatccgcgtgacacctacaagagcgccaaggattgggaggttaaggcagaggatctggccaaccgtttcgtgaagaacttcgtgaagttcacgggcaacgaggagggcaagaaactcgtaaccgcaggcccgaaggtaaagtaattctctgcggcttgagccgctgcaaatagatgaatcccggtttccgcagttggagaccgggattttttatgttgtggaacaggcacggtccggcggatgggcggcggatgtgtgcggacgggtttgcgatcggaggcgatccgtctgcgccggtcgctgtcggttttgccggggcgatgcggggttgccgcgcccgtgtgtgcggggtttgccggacaaacggatggaaaaagcccggcaggaataaatttccagccgggcttttcgtcttgcggaagccggcaggtcagaccgtcataatctccttctccttcttcgaaagcgcttcgtccagcgtcttggagaacttttcgagcagtttctgcgactgcgtttcgccgtccttcgattcgtcctcgggcatgccctccttctgggccttcttgaaggcttccaccgcgtcgcggcgggcgttgcgcaggctgatgcgggcggtctccgcttcggcgcgcacctgcttcaccagctctttgcggcgctcctccgtaaggggcggaatcgtcaggcggatctgctcgccgttgttcgagggcgtcaggccgatgttcgagtcgatgatggctttctcgatcgggcgcagcatgttcttgtcccacggctggatcaggatggtcctggcgtcgggtacggtgacgctggcagcgcccgaaacgggaacctgcgagccgaaatagtcgaccatcacgccgttcagggcgttgggcgacgccttgccggcgcgaacgttcaaaagttcctcttcgaggtggtcgatggccttctgcatgcggcccgtagcttcgttgagaatcgtcttggtatccataagtgttggggtttaatttccgagtgttttttcgatggtgcggatcagctcctcgaattcatgttcgtcgtagcctaccgtggccagcacgaccttgcccttgcggtcgatcacgaagttccgcgggatgtagttcgaggcgtagcggtcgtagacggtgcgtgcggggtcgagtcccatcgggaaggcgtagccggtcttttcgcggaacgcctccacggcctcgcgtttctcgcctcgcgatacgggcaggaagacgaactccttgccggcgaagcggtcgatgatgtccgtctgcacgcgggtcagctcctgccggcagggcggacaccacgtggcccagaagttgagcagcacgactttgcccttcaggtcgccgagcgtcacggagctgccgtcgaccatctcgaccgtgaagtccggagccgtgtctccggactttacgagcgttgtcgattcggcgtccgtctcggcgcccttcttggcgttgcggttgccgcacgagggcagcagcaggatgacggcgatgatcgcggcgatcagcgccagcatcacccacagcgatttgttgcttttcttggttgccatagtcttacagttttaccagcgttccgatcttctccccggcaaggactttgccgaggttgcccgcggtgtccatgtcgaagacgatgatccggagaccgttctcgcggcagagcgtgaaggccgtgaggtccatgaccttcagacggcggtcgaggacctcctcgaacgtgatttcgtcgaatttcgtcgctgcggggtccttctccgggtcggccgtgtagacgccgtccacgcgggtgcccttcagcatcacgtcggcctcaatctcgatgccgcgcagcgccgacgccgagtcggtcgtgaagtaggggttcgacgtgccgcctccgacgatcaccacgtagcccgcttcgaggtattcgatggcacgggctttggagtagtattcgccgatgggttccatgcggatcgaggtgagcaccttgcatcggacgccgttgtcttcgagcgccgactggagcgccagcgagttgatgatcgtggcgagcatgcccatctggtcgcccttcacgcggtcgaagccctttttggcgcccgtgaggccgcggaagatgttgccgccgccgatgacgatgccgatctggacgcccgttgctgcggcggctttgatctgctcggcgtaggattgcagcgtctcgggggaaagcccgtatttctgtccgccttgcagcgattcgccgctcaatttcaggagtattcgcttgtatttcatcgtgggtcgcgttttatcgtagtgcgaagataggtattttttcgaaaaaattcatatatattccttatctttggtgtcgtaacgacacttttaccggtcggagcgttttgccgggccgcgcgcgattcggttttggaggcgtccgttcttttttctatctttgcaatccttatgtcgtcggaagaatataaactgctcgatacgatttcctcaccgcgggagttgaaaaaactcccgccggaggagctgtccgcctactgcgacgagctgaggcgttacatcatcgacgagtgtgcggtcaatccgggccacctggcatcgagcctcggggccgtggaactggctgcggccctgcattacgtcttcgacaccccggaggaccggatcgtctgggacgtcggccatcagacctacgcccacaagatcatcacgggacgccgcgaggcgtttaaaaccaaacggcagctgaacggcatcagcggttttccgcgcatgtccgagagcgaatacgattctttcgggggcgggcacgcttcggtgtcgatctccgcggcgttcggcatggccaaggccgccgaactgcggggcgagaagcggcaggtcgtggccgtgatcggcgacggctcgatgaccggagggcttgcgttcgaggggctgaacaacgccggggcctcgaagcgcaccaacctgctggtgattctcaacgacaacaacatggccatcgaccaggccacgggagcgctgaaaaactacctgctgaaaatctcgacttcggtgcactacaaccgtttcaaacaacggctgtgggggctgatgtcgcatacgccgcggctgctgcggctctgccagaaggcgggcaacgccgtgaagcaggggctgctgaacaagagcaattttttcgaaagtctcaatttccgttatttcggtccggtggacggtcacaacctcaaggagttggtgcggacgcttcgggcgttgcgcgacatcgaggggcctaaactgctgcacgtgatgacggtcaagggcaagggctacctgccggccgagcacgaccagcccgcctggcacgccccggggcgtttcaatcccgacacgggcgagcggatttcggctccgggcggcgcagcgcgttatcaggacgtgttcggcgaaaccctgctggaactggcgcgccgcgacgggcgcgtcgtgggcgtcacgcccgccatgccgtcgggctgttcgatgaacattctgctgcgcgagatgcccggccgctgtttcgacgtgggcatcgccgaagggcatgccgtgactttctcggccggactggccgcggcgggcatgattcccttctgcaacatttattcgagtttcatgcagcgggcctacgacaatgtgatccacgacgttgcgattcaggatcttccggtggtgatgtgtctcgaccggggcggcctggtgggcgaggacggggtgacgcaccacggggtcttcgacatggccgctttcggcgccgtgccgggactgacgatcgccgcgccgatgaacgaacccgaactgcgcaacatgatgtatacggccctcggatcgggacatccctttatgatccgctatccgcgggggcacggcgagggcttgccgtggcgcggcgagaagttcgagacgctgcccgtcggacgtggccgccgcctgcgcgagggcgcagacgtggcgctgttgaccgtggggaccgtcggcaacgccgccgcacgggccgccggacgcgctgccgcggaaggcgtgagcgtcgcgcattacgacctgcggttcgtgaaaccgctggatgaagcgttgctggacgaagtggggcgtaagttccgccgtgtggtcacggtcgaggacggttcgctgcgcggaggcgtcggcgaagccgtcgcggcgttcttcaacggccgcggctacgacgtgcgggtgcagcggctcggcatcggcgacgagtgggtcgaacacggcacgcccgggcagttgtacgccctgtgcggctacgacgaggagggcattctgcgcgccctgctcgatacccgcgcataaattttccgcaacgcattttttcggcacaaattctgcgagattgcttcccaaaacgaccgggaagtgaaaatcgccattttattgcttgctgccgcccttttgattccgggtgcggtggctgtcgcggcggcttcggaccgcaccgaccgcatgcctgtcgccgtgttcgacctgcggccggccgaagcgcggggctgccgcaccgggtaactgttgttcgtggatcaggggcggggaactccgccgtcttcgccgtaaaggcatttgtcagagcgtgaacacccagtcgtcgcctttcgagagggccgggtccaggcggaagccttcccattcgaacgaccggagcgtcgcgggatcggcgatgcggtttttcaggatatgccgcgtcatctctccgcggcacattttcgtatagaccacgacggttttcagccggtcgccctcgcggacgcggaattcgggcgtgatgacccgggcttcgcggcagacgcgtttccagtcgaacagccgcttcatctctccgctcgccaggttgaccaggatgccgtcgtcggcgtgaatccggcccagcaggtcgtcggtcagccggctttgccagtaggaaaacatcgtttcgtcgccgcggccgggcagtacggcgtcgccttcgagccggtaggtgcggatggcgtccagcggacggagcagtccgtagaggaacgaggtgatgttgaggtgccgttgggcgtattcgaaatcggcgtcggtgaaactcgccgggtcgatgcgtttgaagacgattcccgtgtaggccgtaagggctgggatcgccgcgtcgtcgtcgccgtggaagcggccgtagcgcaggcggttttcggcggcgatacggcggttgacgcgcaggagccgggccagttcgtcggtcgggagcgtcgccagcccggcggccagttcggaggcctcgctgcggtaggcgggccgggtcgtgcggggcgtcgggacggaactgcgctccgtcatcgtcttggcgcaggagaggagcagctgcatggcgttcgggcgttaagctacggagcaggggatgccgagcgcttcgacgcgtgcggcgatggcctgcaactcctctttggtgactttttcgagcgtcgggcagggggtgtcgcggtcgagcgagtagaccatcacctgctgcgggcggatttcggcgacgagccggagccaggccgagacttcctcttcggtggtgttgtcgacgggctgtccgccgcactccccgcgcaggaacatcgtttgcagaatcatgcgcccgtcgaagcgtttcatcgcttcgacgatgccccgcaccgtgtaggacgcgctttgcgggttgttcatccgccgcaccgtcgcgtcgaacgccgaatcgagtttgaggatgttgttgtccacgcgcagcagggcgcggcggacgctgtcgcggtggatctgcgtggcgttggagagcaccgagaccttcgccgcggggcacagcgcgtcgcgcagggcgatcgtgtcgccgatgacggcttcgaaatcggggtgcatggtcggttcgccgttgccggcgaaggtgatcacgtcgggcggcgtggagtcggccgccatgcgccgcagggtggcttcgagctgcgtgcgcacgtcctcgcggctgttgaagcgtcgtccgcccgggtgctcggcattccagccgcactcgcagtagatgcagtcgaacgagcagagtttcgaggagagcgggagcaggttgactcccagcgaaaggcccagccgccgcgaatgcaccgggccgaagataatgtcgtgaaatagcgctgtcatggtgcgaaattaagaattaagaattaggaattcaaaattaattcctaattttaccaaaataccgttttatgaaattcaaattcggacttttgccgcgcgtcgtgctggccattgcgctgggcgtcgcctgcggattcttcctccccggctgggcgacgcgcatcgcgctgaccttcaatgcgattttcgggcagtttctgggattcgccattccgctgctgattctcgggctggtggctccgggcatcgccgatctgggccggaacgccgggcgtctgctggccctgaccgccgcgctggcctatgccttcacgctcttttcggggttcgggacctatctgacggggcggtttctctttccggcgctgctcgaaggctccgccgccgtattgcccgaggaaggggcggcccttgcgccctatttcacggtcgaaatgcctcccgtgatgggtgtgatgtcggcgctggtcctcgccttcgtgctggggctgggcatggcctatatccgttcggtgacgctcaaggcggcgatggacgatttcaagcggatcatcgagctggtgattctgcgcgtcatcattccgctgctgcccttctacattttcggcatctttctgtcgatgacccagtcggggcaggtggccggggtgctggacgtcttcgtgaaactgatcgcggtgatcttctgcatgacggtcgtgctgcttctcgtgcagttctccgtcgcggggcttgcggcgcgtaaaaatccgctgaagatgctccgcacgatgctcaccgcctatatgacggccctcggaacgcagtcgtccgccgcgacgatccccgtgacgctggcccagaccgtgaagctcggcgtgcggcccgaactggcgtcgttcgttgtgccgctgtgcgccacgatccacctctcgggttcgatgatgaagatcacggcctgtgcgctggccgtgtcgatgatcgccgggctggacattccggcgtcgaccttcgcggggttcatcctgctgctggccgtgacgatggtggcggctccgggcgtgccgggaggggcgatcatggcggcgctgggactgttggagtcgatgctcggtttcgacgagaccctcgcggggctgatgatcgccacctacatcgccatggacagcttcggaacggcgaccaacgtgacgggcgacggcgccgtggcggtgatcgtcgatgcgatcgaccggcggcgttgaaaaactccgttcccgggccgccgtcggcggcccttttccttatttagaactgaaataagtataaatgcgtatccttgtggaataaaaaacggctacttttgaatgccgattccgttttatgtatacttttgtgcgtccaaaacggaaaaaagagacataaactcataattacaagacaaatatggttgatatttttgcacgcctcgagaaaaatgcgggcggaccgatcggtcagtacatgtcgtacgcccacggttattatgcctttcccaaactcgaaggcgacatcggtccccacatggttttccggggcaagaagatgctcaactggagcctgaacaattacctcggactggccaaccaccccgaggtgcgcaaggccgacgccgaaggcgctgcgcagttcggtatggcggccccgatgggcgcccgcatgatgagcggacagaccgtttaccacgagcgtctggagcgtgagctggccgcgtttgtcggcaaggaggatgccttcctgctcaatttcggttaccagggcatgatctcgatcatcgactgcctgctgaccccccgcgacgtggtcgtctacgatgccgaggcgcacgcctgcatcatcgacggactgcgcctgcacaagggcaaacgcttcgttttcggtcataacgacatggagtcgctgcgcctgcagttgcagcatgccacggatttggccgaggagcagaacggcggcgtgctggtgatcaccgagggcgtgttcggcatgaagggcgacctgggcaagctcgacgagatcgtggcgctgaagaaggatttccagttccgtctgctggtggacgacgcccacggcttcggtacgatgggcccgggcggtcgcggcacggcggcgcatttcggcgttgtcgacggcgtggacgtgctcttcaacaccttcgccaagtcgatggccgggatcggcgctttcgtgagcggtccccgctggctgatcaacctgctgcgctacaacatgcgttcgcagctttacgcaaagtcgctcccgatgccgatggtgatcggcgcgctgaagcgtctggagctgatccgcaaccaccccgaattccaggagaaactctgggagaacgtccgtgcgctccaaagcagcctgaaagagaacgggttcgagatcggtgtgaccaactcgccggtgacgcccgtctttctgaagggcggcattcccgaggccacgaatctggtcgtggacctgcgcgagaaccacggtattttctgctcgatggtggtttatcccgtgattccgaagggtgagatcatcctgcgcatcatcccgacggcggtgcatacgctggaggatgtgaaagttacgattgaggctttcaaggccgttcgcgagaaactcgaaaccggcgtatacgcttcgatgcccattccggcacgtgccgacgaagggtttatggtccgctaaaggcggtttccgatacggatgtccccggctttgcggccggggacattttgtttttgacaaaagtagccgaaaaattttgcagaataaatttttcattttatatttgcagtcccgaaacgcaggaaacgaagttttcccgggcggggaagatagattttgcggaaatagctcagttggtagagcgcaaccttgccaaggttgaggtcgcgggtccgagtcccgttttccgctcacgacaaacgagtgataatcaatgaattatcgctcgtttttctttttctaccgtgtgttacagatgtccgttgtgtaacacaaaatgccttgaaatcgccgtttgtgatacagagtgtgatacataaaatcgtgcactactgtcccgtaaaagcgggcaagtcggtctttgaaatagttgaaacatagtctattagaagtaatttttcatgtgcgacgatttgaatttgtaattttgcagcccataaagggactgctctatgaacaaagacaaatatgtattcgctcaattggttgcatttctcgacaacaacaagttccgtcacctggttgacaagtatgatgggaacaggtatgtcaagaacttcacctgctggaatcagctcatggcactcatgttcggacaactctgtaaccgtgagagcctgcgtgatgttgtcgttgcattggagactcaccaatccaaatgttatcaccttggaatggggcgtaatccaatagcgaaaacgacatttgccacagcgaatcagaatcgtgactacaggatctttgaagactttgccttcttcatgatggaacaggctcgcaagaaacgagcaaccgacatcttcaagctgaaggggaatgtttatgcatttgattcaacaacgattccgcactgcttgtcagtattctggtgggcaaagttccgcaagaagaaaggaggcgttaaggcgcatgtcctttatgatctggagtcccaagtttctgctttcttccatattacgactgcatcggtacacgattcaaaggcaatgaaggagatttcctatgaatcaggttcttactacgtatttgaccgtggttacaatgcattcaaggaactctacaagatttgtcttaatgaatcatacttcgtggttcgggcgaagaagaacttacagtacaagtgtacgaaatggaaacgtagattgcctaagaatgtgctttctgattccgttattgaactcacggatgtgaacacacagaagaagtttcctgagaggctgcgacttgtgagatttcacgatgacgagcaagacagagacttcgcatttttgacgaatgcattccatcttaccgctctcgaaattgctaatctctacaagaaccgatggcagattgagttgttcttcaagtggctcaagcagcacctcaagattaagaaattctggggcactacagagaacgctgtcagaatacaaatttgctctgcaatcataacttattgccttgtcgccatcgtccaacacgacatgcgactaaagcggtcaacttatgaggtcctgcagattttgagcatctcactaacggataagactccactgagagatctcttcgaaaagactaatttcaacgatgtcaaagaactcgattatcccctcttggagggactatttgattaatattaacttcgtcccaattttaacgggacactaatgaaaatcgtgtaacacacgaatcgcattttgttgcttgcgtaatccgtaaagattatgacaatcaacgtcgtatgtcgcagagacgctatcaacagaaaccgtttagcccctcttgctcttgtctttacccatgaccgccgccgtaagttcgtcggtctgggcatttcggaagctttggtgcattgggatttcgacaagcaacaacctaccgccgactgccccgatagagcagaaatacagtttcaaataacctccaagatacgtgaatacgagaggaaaatcaaaaagttggaggtgctggaaattcccgttacattcgatacgctgtttgaacagaacggcaaacgaatcaactgcacggtcggggagtacttcaaacagattatcgaacgcttggaaaaagtcgaaaagtacagttccgccagcaaacataaggtaacgttggtccttgtgtcgcaattccgctcggtcaatatgcgttttgatgaattggatttgacgtatttaagggagtttgaaatcttcttgagtcaaaagggtaatgtaaacaacagttgcaattatgcagcattccaatactgccggttgtatcttattgaaattctacatcaaaccacaacacactgcaaatgtatacaatttactttatgttgtatcttatcgaaattctacatcaaaccacaacacccttcgaaggtttttgcccgctatcagagttgtatcttatcgaaattctacatcaaaccacaacatctggactgacaagacagatcaagagatgttgtatcttatcgaaattctacatcaaaccacaactgcaaatgtatacaatttactttacattccgttgtatcttatcgaaattctacatcaaaccacaactgcaaatgtatacaatttactttacattccgttgtatcttatcgaaattctacatcaaaccacaactggtcctcgaagcgcttttgctcccgccttgttgtatcttatcgaaattctacatcaaaccacaactgatgatgaccacgcgcgaagggtctatgcgttgtatcttatcgaaattctacatcaaaccacaacgtgttcataccagcttcgaaaatggactagttgtatcttatcgaaattctacatcaaaccacaaccgcgtaacgatcaacccgcgtttacgcagcgttgtatcttatcgaaattctacatcaaaccacaacatcgagaacggagaggatacgctgaccgcgttgtatcttatcgaaattctacatcaaaccacaactctcgatccgttcttcccataaagcctcctgttgtatcttatcgaaattctacatcaaaccacaaccggggattctgtcaccgtgctgatcacgaagttgtatcttatcgaaattctacatcaaaccacaacatagtgcatacgatgggtagaaacacggcgttgtatcttatcgaaattctacatcaaaccacaacacctcgcgctgaacggtggtcgctggtccggttgtatcttatcgaaattctacatcaaaccacaacgccggacgcacgcgtaaaagctgtgccgttgttgtatcttatcgaaattctacatcaaaccacaactacagatcgcgctgccgttaagaacggccggttgtatcttatcgaaattctacatcaaaccacaacaaacgaagcagccacaacatcggacaattagttgtatcttatcgaaattctacatcaaaccacaactaaagttttttttatatatttgtggtgtaagaattctacatcttatcacaataaggctatatgccgaaggttttcaacctattgtctccgcgtactccgtggagactttttttatatttcgtgaataatttaaaaaccgtcggttgctattgcggagtgtgccggcgctgtggctttttgccttcgggagttcatggtgccgaaaacagaaggtcgcatgtcggaccgtccgccactcgccgtgcgacgcaccgacatgaagcatccccaattgcagcgttcatcaagggcatatcgttggaatatgcaggaatactttatatcgagactctgaaaccgggaaaacacgcgaatggaaattcagcgacgccttctgttcccgggcgcattcgcgcacgaggctctgccgcgggcggacgatgacgaaccggataaaaagcgcaccccgaaatccttttccggattttcggggtgcgcttcattcgggcgggcggctgtccggcgcgttatcgggcgggatgttccgggcgtttgctgaaaatggccttgatccggtccatgtcgaacttggccgagcggtcgtagcaatagatgccgttctgttcctgttccacgtccgtgagctgggtgtagcaatagccccacacctgtccggagagcgagagcagcgcgtctacctggccttcgagccgcgtgtagaactcttcgagcgtacggggcgcctgtccgtaaccccacgattcggtctgggaatccgtggcctgcttctcctggtccttcacccatttgatgccgccgaattcatcgaccaggtaggggcacgagccatcgtactgcggccaggcgtagtttgcggtcgccttcacctcgttgaatccgatgttgcgcgtctggtcgcgggtcgtccgcaggcggggatggaagaacgtgccgtcgctgaagattttctctttcagtttggccgggttctgctcgtaattgtggacggcccagatgtcggtcctgacgacggcgccgccgctgacggtgttgacggggcgcgtcgggtcgaggcgccccgtcaggtcgtagacgtcggaggcgaagcgcgggaactgcgtgttgtcgggccaccactcctcgttcatcggcgtccacgtcagcagcgaggggtggttccggtcgcggaccacgcattcggcccactcggagaggaagttgcgggccgtttccacgtcgttggcatccattccccagctggggctttcgccccaggtgatgtagccgagtctgtcggcccagtaatagtagcgttcctcgaaaaccttctgatgcaggcgtgcgccgttgaacccggcggccagtcccagctcgatgtcgcggcgcagggcgtcgtccgacggggcggtccagataccgtcggggtagaaaccctggtcgagcaccagccgctggtaatagggttcgttgttgaggtagattttgttgccttcgatgtggaccttgcgcatcccgacataggatttcacggcgtcgagcacctggccgtcgggggcgaccacctcgtaggtcaggtcgtagaggaacgggtcttcgggactccagagccgggcctttttgaccgggatgacgacgacgctgctgttcgacgcccggacctgccgcgtgccgacgaccttgccgccgtcccgaagggtcacccggagcgtgttcgggctttcccggaagaactgcggggcgacgatcagctgctgctggtcgatgtcggtcgtcatttggacgcgtgcgagggcctcgggagccacggcctccatccacaccgtctgccagatgcctgtcgtgcgggtgtagtcgcaactgtgcgaggcgtattgcagcgactgtttgccggcagtctgtttgccgctgcgcaggtcgctcgtggcgaagacgaccagactgtggctgccgcccggcttcacgaatgcggtgatgtcgtaggagaacgacgtgctgcctccgaagtggcgtccgacgaagcggccgtcgacatacacctcggaggtgtagtacacggctccgaagttgagcatcacgttgcgtcccgaccagtctgccggaatgtcgatcgtacgctggtaccagatgcggcctatgaagtccgtgtggccgacgcccgagagcttgctctccggggcgaacggcacgatgattttgccgtcgaatcccttcgagccggcgtagccgcgttccaggccgcttgcgccgaaatcgaacgtgtaggtccattcgccgttcaggttgatccagtccgtccgctcgaactgcgggcggggatattccgggcgggggatctgcgaaaacagacacgcggcctgaagcaggaaaaagagggtgattgcggttttcttcatggttgtttttggttggtttgcttgttttcggggtggttattccggtgcgatgtcgaaccggccgggcggctccgtgcgctgcgccccggcgagcggcggcagcatgccgcaagggagcagcagcaggatgtgcgcatgtttcatggcttcgtctatgggtttgctgtgccgaagttacgaaactttttcggaatacggagcgggtcagaggttaattttgcaggggaacaggctgaagacccgaaaaaaatagactatattcgtacgatcaaaactgcccgactgataggaaaaagagactcttgcactgttggggaccctgcaccttcgtcggagcgcaggtcccgtggccgacgcttttcaacggccggaacctgaaaggctggaagacggtcggcgggacggaatcgtttttgtgttatatttacggataaaacgaatgcggttatggaacgggagaacgtcttttatatcaaaaacatggtttgcaaccgctgcattctggtcgtcacccggctgctcgaaaaagcggggttcacgcccctcgatgtcggactgggaacggtcgtcgtgcaggagaagcccggccgggagcagcgggaggcgttccgcaaactgctcgaagcctacgggttcgaactgatcgacgacagccggatgcgcctcatcgagcagatccggacggccgtgatcgaattggtgcattacagcgaagatgcctcgaaagtcaacctgtcggattacctgcgcgaacgctgccaccgtgattacagtgcgttgagcaagctcttttcggaggtcaacggcatcagcatcgagaaatacttcctcgcccagcggatcgagcgggtcaaggaactgctggcctacggcgacctgaccgtcagcgagatcgccgacaaactccgttattcgagcgtggcgcacctcagcgcccagttccgcgcccagaccgggatgtcgcccactgaattccgccggctgaaaggacgcggcctgaaaccgctggatgaagtgtaggtataaatcatatccataattctgtaacacccggagcgtgtcgggaccttacctttgttcccatggaaaagagtaagatcatcacgaatacgttcccggtcgcaggcatgagctgcgcttcgtgcgcagtccgggtcgataaggcgctcaacggcctgccgggcgtcgagtctgcgcatgtgaactacgcttccgctacggcgcgggtggactaccgttcgggggagtgctctcccgggacgctgaagcgggccgtgcaggcggccggttacgacctgctgaccgacgcggaaggcccggcggaggacgaggcggcgcacgttcgtgcggcgcattaccgggcgctcaaacggcggactctttgggcggcggggctttgtcttccgattgtggccggaggcatgctgttcatggacgctccggccgtgaaatacgccgtgtgggcgctctccaccccggtcgttttcggactgggacgggagttcttcgtcaacgcctggaaacagctccgccacggggcggccaacatggatacgctggttgccgtcagtaccggaatcgcctatctgttcagccttttcaacctgtttttcccggaattctggctgtcgaggggcatcgagccgcacgtctatttcgagtcggcggccgtcatcgtcgccttcatcctgctggggcggctgcttgaggagcgggcgaagcgcggcacgacgacggccatcgcgaaactgatgggcctgcaaccgaaaaccgtcacggtgatcaccccttcgggcgaacgctccgtgcccgttgcggagcttcgcgccggggatctggtcgccgtgcatcccggcgaacgcatcgccgtggacggcacggtggccgaaggcgcgtcgtatgtcgacgagagcatgctcagcggggaaccgctccccgtctgcaaacaggagggtgcggcggtgttcgccggaacgatgaatggcaacggtgcgttccgtttccgggccgacagggtggggcaggacacggtgctggcccggatcatccgcatggtgcgggatgcgcagggcagcaaggcccccgtgcagcggaccgtcgaccggatcgccggcgttttcgttcccgccatcatcgtcctcgccgtgctgaccttcgcggcgtggatgcttttcgctccggaggagggcttcacccgcgggctgctggcgctggtgaccgtgctgatcatcgcgtgcccctgtgcgctgggtctggcgacgcccacggccctcatggtcgggatcggcaagggcgccggacagggcatcctcgtcaaggacgctgcgagcctggaggtggcccggaaggtcgacaccgtggtgctggacaagaccggaacgctcaccgaaggccgtccgtcggtcgtggacgctgcgtgggccgaagggccggagacggcgcggcggattctgttcagccttgaaaaacgctcggggcatccgctttcgcaggccgtcgtcgaatcgctcggcggggagcgggacgttcccgtgaccgggttcgaaagcattcccggacagggtgtccggggcgtcgcggaggggcggacctggtatgccgggaacgacgcgctgctgtcccgccacggcatcgtgcccgacgcccgcctgcaacggctggccgaagggtggatgcaggaggcgaagaccgtggtttggttcgccgacgaggagcggacgcgcgccgtgctcgcccttgccgatgcgctgaaaccctcgtcggccggggccgtcgcccggctgcacgcgctgggaatcacggtctggatgctgacgggcgacaacgccggttcggcgcgcgaaacggcccggaaagccgggatcacccgtttccgggcgggcgtcctgccgcacgaaaaggccggattcgtccggcagttgcagtccgaaggccggacggtggccatggccggcgacgggatcaacgacagcgcggctctcgcgcaggccgatttgagcgtcgccatggggcgggggagcgacattgcgatggataccgcgatggtgacgatcctctcgtcggacctccggaaaatcccggagatgatccggctgtcgcagctcaccgtgcggacgattcgccagaacctcttctgggccttcatttacaacctcgtcgccattcccgtagcggccggggcgctctatcccctctgggggtttctgctcgacccgatgatcggcggggcggccatggccttgagcagcgtgagcgtcgtggccaacagcttgcggctgaaacgccggcggatcggcgatgagtgtgaacatgacgaaccggttgaaaccgaagaaaagatgaaaaaggaatttatcgtggacggcatgacgtgcaatcattgccggatgcatgtggaacatgcgctgaacgccctcgacggcgtgaaggcggtcgtgacgctggaccctccggtggccgccgtggagtactccgggccggaagtcggcctcggggagttgcagaaggccgttacggagcgggccggggagtataccctgcgggcgcggtgacggcggacgcccctgcgcaggcggggcgtttttttcgtgccgcgccgcatctttccggcgaatgtccggcggaaaatgcgttttagcattaactttgctgtcggatcgtgtaaagtatgctgatggagactctttcccgttggatcggcggcgtgaacgacgtgctgtggacctatgtgctggtcgcggcgctcttggggtgtgccgtgtggttcaccctgcgcacgcggggcgtgcagttccgcctgctgggcgagatgatgcgcgtgctgggcgagtcggccggaagcggcccgaagggcgagcggcacgtctcgtcgttccaggctttcgccgtgtcgctggccagccgcgtcggcacggggaatctcgcgggcgtcgccacggccatcgtcgtcgggggacccggcgcggtcttctggatgtgggtcatcgcccttgtgggcgccgcgagcgctttcgtcgagtcgaccctcgcacagctttacaaacgccgcagcagggactctttcatcggcggtccggcctactacatggaacgcggcctcgggcggaggtggatgggcgtgctgttcgccgtgctgatctccgtgaccttcggattcgccttcaactcggtgcagagcaacacgatctgcgccgcgtgggagggagctttcggcgccgatcatgtgtgggtgggcgtcgtgctcacggcgctgacgctgctcatcatcttcggaggcatacggcgcattgcgcgtgtcagcggcgtgatcgtcccgattatggcgctggggtacatcgtgctggcgctgggcgtcgtgctgttcaacctcgggcggctgcccgaagtgctggaactgatcgtcgccgacgctttcggctgggagcagacgctgggcggcgcggtcggcgcggcgttgatgcagggcatcaagcggggacttttcagcaacgaggccggtatgggttcggccccgaacgtcgccgccacggcccacgtttcgcaccccgtgaagcagggacttatccagaccctcggggtcttcaccgatacgctcgtcatctgcacctgcacggccttcatcatcctgttcgggggcgttcccgacgcttcgctcaacggcattcagctgacgcaggcggctctggagagcgagatcggtcccgcgggcggggtgttcgtcgccgtggcgatcttcctgttcgccttttcgtcgattatcggcaattattactacggcgaagccaacatccgcttcatcactccgcggccgtgggcgctgacgctctaccggatgctggtcggcgcgatggtgctcttcggatccttggcgacgctcgatctggcatggagcctggccgatgtgacgatggcgctgatgacgctgtgcaatctggcggcgatcgtgctgctgggccgtcaggccttcctgctgctggccgactacacggcccagaagcggcagggcatcaaaaatccggtcttcacgaaagaccggattcccgaattgaaagacaaggccgagtgctggtagcgcattactccaccagccggcgcgtcacgctccaccgctgcatcagccgcaccaccgcccagctcacggcgaaggccccgcaggcgatcagcgcgatgcgcgccagcgcgggaagtcccggaatccgctgcacgaggtcgtagccggcctgaacgaagatgaagtggcagaggtagatgccgaacgtcgcgcccgccagccgcgagagccatgcgcggggccgtgcggcggccttctgcacgaggatgaagaccggggcggtcatcataaagacgttgatgccggcgaaataccagacgatttcgaggtaggcgtagttgcccggaaaatgtttctgcatcaccacgtaacccagccccgtggcgaggtatccggcgaggaaggtcgggatgcagatgcccaatgtcttgcgccagttccatgcgggcgggaatttcacgaggtagaaggccagtacgaggtaaccggcgaagcccgagacgtagtggaacgtgccgaactcgttccagtcgcagacgccgtaaagccccgtgttgccgtaattgcccgtgtagccgagcgccggggccagcatcttcacgtagggcagcagcagcgtcacgccccagatcgcgaggacgctctgcaactcgcgccgcgaggcccgttcgagccacgggctgatcagcggcatgatcagataaagtcctatcagcatatagagataccagagcggcgtggtgtcgtagcagaagttgaagacgaaggtccacatcttgtgcagcgtcgcttcgccggtgaacagcgcggggtcgatcgacggactggaggtcccgacgtagcgcatatacaggtagtagagcacgggcagcgtcagcgaccagaagaccagcgccaggaggacgcggccgatccgcttgcggtagaaagcccccgttccggtccgcacgggcagcagcagcacgcccgacatcatcacgaacagcggcacgcaggcccggacgaaactgcctgccaacgctccttgcaggaaggtggcgcggtcgctgtcgaacacggcgacgaaggcgtcgcagctgtgggagaagaccaccagaaagcaggcgatcacgcgcaggaggtccacccagccgatgcgttcgcgggccgggacgttcaggtcgggaagtcggttcttcattgtcgcagaaatggatttccggcgaaggtacgaaaaaaatccgggaccgccgtgcgttttcgccgcggcgtcccggatttttggttgtccgcactccctccggcggacgtccccttcgggtcagttgaccaccaccgtcgggaagtattcgcgcagcagggccgcggcgcggtcgagctgttcgggggtgttctcccgcacgtcgcggagtttgtactccagccccatcgcctcgtacttatgcactccgagggtgtggtaggggagcagttcgacccgctcgaccgacttgtagccgccgaggcgttcgcccagcgcacggatgtcggcttcggcgtcgctgatgcccggaaccagcacgtagcgtagccagaagggttttccgtgggcttcgagccaggcggccgtgcggagcgtctgcgcgttttcgcgtccggtgagggcgcggtggcgttcggaatcggcctgcttcacgtccagcagcaccaggtcgaccagccccagcagctcctcgacggccgggttccacaccccgccgttcgagtcgatgcagacgtggatgccggcctccttcaacgactttacgagcggaacgagttccgcggcctggaaggtgggttccccgcccgagaaggtcacgccgccgcgccgcccgaagaaggacttctggtcgacggccatgcgcaggatctccgcagggtcggtcaatgtgcccgctccggcctcgatcgtgtcggggttggcgcagtagagacagcggaaattgcagccttggaggaaaacgacgagccggagtcccggcccgtcgaatgttcccatggattcgtaagaatgtacacgaagcatgattgttccttgtttttgaataaggggggtcgggcgcaaaccgggttccggtatgcaaatcctgcgcccgcccctaaaagcggcttttcaagccgttacatcctttcgtggaagctgcggctgatgacttcgagctggtgttcgcggctcaacttggtgaagttcacggcgtagcccgagacgcggatcgtcagctgcggatatttctcggggtgctccatggcgtcttcgagcatctcgcggttcagtacgttgacgttcaggtggtgtgcacccttggtgaaatagccgtcgagcatcgtcacgaggttctcgatacgctctccggccgtcgggccgagcgatttgggcacgatcgagaaggtgttcgaaataccgtcctgcgagtcgcggtaacgcatcttggccaccgaggcgagcgaagcgatggcgccgctcttgtcgcggccgtgcatcgggttggctcccggagcgaaggccacgcccttgaggcgtccgtcgggcgttgcgccggtcttcttgccgtacatcacgttcgaggtgatcgtcagcagcgacagcgtcggtcgggcgttcttgtagacgggcagcttcttcagctcctcgctgaagtagtagacgaggtccacgcccagatggtcgacacggtcgtcgttgttgccgtagcagggaaattcaccctcgatgtcgaaggcttcggtgagaccctcggcgttgcggcggggcgtcacgcgggcgtatttgatggccgagagcgagtcgagggcgatcgagagaccggccacgccgtaggcgagattgatgcggggatcggtgtcgacgaatgccatctgggccttctcgtagtagtacttgtcgtgcatgtagtggatgatgttcatggcctcgttgtagacgcgggcgatctccttgagcaccatcttgtagttgcgcatcacctcctcgaagcgcagcggaccctccgacagggccggaatgcccttgaccatcagcgtgccggtgttctcgcagcgaccttcgttaatggccagcagcagggccttggccaggttggtgcgggcgccgaagaactggatctggcggccgatgtcctggaacgagacgcagcaggcgatgccgtagtcgtccgagtggcgcacttcgcgcatcaggtcgtcgttctcgtactggatcgagctggtgtcggccgaaaccttggcgcagaagtccttgaatccctgcggcagctcggggctccagagaatcgtgaggttcggttcgggcgaaggaccgaggttgtagagcgtttgcaggaagcggaacgaggtcttcgtcaccttcgtgcgaccgtcgttgaagcgtccgccgatggcctcggtcacccacgtcgggtcgccggcgaagatgtcgttgtaggactgcatgcgcaggtggcgcaccatgcgcagcttgatgacgaactggtcgatcagctcctgggcgaacgactcgtcgatcgtcccgtgcgcgaggtcgtattcgatgaagatgtcgaggaacgacgatacgttgcccagcgacatggcggctccgtcctgctccttgacggcggccaggtaggccatgtagacccactgcacggcctcctgcgccgaatgcgccgggcggctgaggtccagtccgtagtattcgcccatcgtgcggatgtccttcagggccttgatctgctcggcgacctcttcgcgcaggcggatgcgggcgtcggtcatcgggccggtgaggttgcggaggtcctcctgcttggcctcgatcaggcggtcggttccgtagagggccagacggcggtagtcgccgatgatgcggccgcgggcgtagttgtcgggaagacccgtcaggaagcccagcgagcggaacgagcggatctcctcggtgtagacgtcgaacacgccgtcgttgtgcgtcttgcggtagtgggtgaagatgtccttcaccttctcgtcgacctccacgccgttctccttgcaggcgcgcgatacgacgttgatgccgccgaagggtttgatggcgcgcttgagcagttcgtcggtttgcaggcccacgatcagctcgttttcgcggtcgatgtagccggccttgtgcgaggtgacggtcgaaacggtcttgttgtccagcgcgcggacgccgttatgctgacgctcctcttcgagggccttgaggcagaggttccagatgtgcttcgttcgctcggtaggtcctgcgaggaacgaggcgtcgcccaggtagggggtgatgtttgtctgtacgaagctcgtcacgttgatctctttgctccaaagcccgtcgataaaggttttgttcagttccatagatgatattgttcgttttgagatgataattgtcctatttcggtcggcaaagatacgttatttttttcacaccggccaaagagcggttacaattttttataaaaatttaaaaaatacctacgatcaggtattgacggcgccttccgggacatgcaatagttacaggaaggcgttgcggcgtttgtggccctgcttttgcaggggcgggagtgtataaatacgaaaaacgatgaaaagattctggattgccctgctgggtgcggggctttttgcgacggcggcgttcgccggcggtgacgaagttccggtcaggatgcacgaactgcccgatgcggcgaagacgttggtgaaaaagtattttcacgacatcgaggtggtttccgccacgatggagaagggcgtggccccgagctatgaggtgaggctggccgacggtacgaagatcgacttcgacacccgcggcgagtggaccgatgtcgagcggccggggggtgtcgtgccggacgggctgattccgcagccgatcctgaaattcgtggctgcgaactatccggggcggcacgtccggggtgtcgaacgcgacggccgcaaccatgagatcaccctcgacaacggactggaactgaaattcaaccgccgtttccggctggtggagaccgatcactgacggccgacgattggtgcggcggattacggcccgggggtttgagttgcgcatccggcccccgggtcccgccgctttgtaaggtgaaaggtgtaagatgaaaggtgaatttttcatttacaacctttcacctttggctttgataaaaagcgtatctttgcagcgtaaatctcgataacgatggaagaactctcgcttacgacccccgccctgctgttttcggccgtgtcgctgattctgctggcctacaccaaccggtttctgtcctatgcgcaattggtgcgcacgctcaaggagcagcatttgcagcacccctcgaaggtgacgcgcgcgcagatcgacaacctccgccggcggctccacctcacgcgcacgatgcagttgctgggcgtcacgagcctgttcctgtgcgtggtgacgatgtttctgatctacgtggggctgatgctgctttcggcttatgtcttcggtgcggcgttgctgctgctggtcggttcgctgggcgtttcgatctgggagattcagatctcggtccgggcgctggagattcacctcaaggatatggagaacccgcttgacaagcgggattcggaataattgtccggtcgtgttcaagccgcccttttttaagggtgatttagcgaagcggcatcttttgacaaaaacgaagatgccgcgacgtcgcgtcactgcatctcccactaacctacttatgtaacctaaaaccaacttgtgaatccggttctccggttttcacagtgcaaagatacgggtccgtcgtttcgctgaaatgacggacccgttgcattttcgttacacggcgctttttgaagctctccttttcaaaggagggtttgggtggattgtctgcacgatggcgtatcggcattattttttggcctccagaaaatattgctgcgatttgagcaggttgcgcgactggagcatcatcgtcttcgtctcgttgaggatcgtgaggtagagcaccccggcgcgggtgctgcccgacgggacgtcgttgatgcgccgcagctggctcttgatcgcctcgacgatcgtgtcgaagagcttgtcgcgcatttcgagcaccagatcgaggtccgagaaatccttcgtcgccagcatgtcgttgatcttgtcgaaaatcgcctccacctggtcgttcacgcgcatcaggtcgacgatctgctccttcgacatgccctcgtggttgttgtcgatgtgttcgaatgccgggcgcgtgatgtggatcagggccttggtcacctccgagaggtagtccgtgacctgcacgtagaagtgccccgtgtcgatgtcgcaccgttgcaggcggcgcagcgtcggcatgacgttgtatttgcggatgcgggcctcctcgaaaaggcggttcgagtcgcgaaccatctccttgagcaccttgcggttctccttgaagacggctaccagcgtgcggttgtagatgcgcgtgacctcctgcatcgtcgtgcagacctcgccgatgcaggcgcacagcacctcgtcgggggtctcggccgtttcgagcggcagcagggccttttcggcctcctctttcagtccgggcgtcttgaggtggctgcggacgagcagccaggcgcagagcgccgtgagggctgccacggcgatccagccgccccacagcagcagggccgtcacggccagcgcgatgaggaatcctccgagcgccgtgatgaaccaccccgagatgacggccatcacgcccgtgatgcggtagacggcgctttcgcggccccacgagcggtcggcgagcgacgatcccatggccaccatgaagaccacgtaggtcgtcgacagcggcagtttgtaggaggtggcgatggcgatcaggatcgacgcggcggtgaggttgaccacggcgcggaccatgtcgtagggggccgacgaacgctcctcggcagggagcggctcgaaacgccggtcgatggccttctgaacccgcgccggaatcagcccggtccacatcgtgttcatcaccagcgtcgcgcgcaccagactgcgcgaaatgagggtcgaaccgaagcgttcgtcgccctcgtgctgcgaggcgagcgacagttcggtctcggtgacgtgctgcgactttttcgagaagaacaacgtcagcaccatgatcagtcccgagacgcccagcagcaggaagttggcccgggcgggagcttcgagcgcccccatcatcatcgtttcgctgcccgcctcgccggcgatgcgccaggcgtcgtagccggccagcggcacgccgatgaagttcaccaggtcgttgcccgcgaaggcaagggccagcgagaaggttcccgacaggatcgtgatgcgcatgatgttgagccgcatgcgctggaaaatgtagaggaggagcgacgccgcggcccagaaggcgaggagcgtcacgaggacgtggtcgccgacgtaggccgaaacggaggtcgggatcagtcccgagcttttcaaccccttgaacagcgcgaaatagaggattccggccagcgagatgccgcaccagacggctccccagcggcggaagacggcggcgtagcggaacgagaagatgaggcgcgaaatgtacatgaaaagcgttccggccacgaaggccagcgccaccgacaacaggatcgccgcgatgatgaccatggctttgcccgtgttgatgaactgcgagaggtcctgcaaggaggtccccgggtcgccggcgatgcggaacagggcggcggcgacggcggcgcccagcagaccgaagaccatcgacacggtggtcgaggtgggcagtcccagcgtgttgtagaggtccagcagcagcacgttgcccagcatcatgcccagaaacagcatcataatctcctgaaaggagaactgtccggggtagaagacgccgctgcgggcgacctccatcatgccgctcgaggtgagcgtgccgaccagaatgccggcggctgcgacccagaggatcacgcggcgcggtgcgactttcgagccgagggccgagttgaggaagttgacggcgtcgttggcgacgcccacgacgatgcccatcacggccagcagggccaggatgacgacgattgcggtgaatagcggggacatggattatccgttttcgtaattgttatggttctttaccgttgcaaaggtccgaaaccgatgttacaaaggcgttacaggggcgttgcgggggagtgaaaaaatatcggggagcggtaaaaaaccgatccggccgcctgtccggccgcgtgcgacaactgcaagcgacaggcgagcgcaatcgcttgcgaattgccgggccgccacagcagtcaaggcgtgtgtttttgcgccttaactccccgccgaggcggggagtcaggggtggctccgattcgtaaccgcagccaaaggctgcgaatgcggccgggcgggttgtcgtgtagctggaatttgttaactgtgtttcttcaatgtgaagacgaactccagcccgccgcgttcgcgttcgcgggccgtgatcgtgccgccgtggatcgcaacggcgtttttgacgatcgccagccccagtcccgtgccgccctgtttgcgcgatcggcccttgtcgatgcggtagaagcgttcgaagatgtgcggcaggtgctcctcgccgatgccgatgccgttgtcggcgaacgagaccgtgcactcttcgggggtgtcggaaagcagccggatgaagatgtcgcgtccgccggaataggccgcggcgttgtccgcaaggttgcggaatattgatgccagcagcgacgggctgccgacgatctcgacctgctgcgggaagtcgatgttcacccgcagccgctggtcggcgggtttcagttccatgtcggccgtgacctcggcgatcaggtcgttcagcacgacgcgctccttctggatcagctggctcgcctcgtccatgcgcgtgatggtcgagatgtcggccagcagacgccgcagacgctcggtctgtgcggcgctttttttcaggaagtccgtgcgtctttgcgcgtcgagcgacgggttggccagcagtgtttccagatagccctgaatcgctgccacgggggtcttcagctcgtggttgatgttgttggtgagctgtttcttgatgcgtattttctcctgttcctcgtgcagcgcgagggcgtgctcgcggtcgcggtcggcagtggttttttgcagacgggcgtagaggcggatgatgtggctcgatatttcgcccagttcgtcgtgaggaaatgccgggaggtcgtcgatccgctcgctccgctcggcccgttcggcgaattcgttcagccgggtgatgttctggcccaggcggcgcgtggcgaaatagcccgccacgctcatcagcagcgtcacgcccagcatgaaccagaggaattcgcggtcggcggccaggatttcacccagcggcacggagtagggtacggccgaacggacgatgtagcggtcgccccgcatggccgagtagaaatagttgcggtcggtgctttcggagtggcggcggatggtgtaccccgtcccgcgggccagcgcctcggcgacctcggggcggtcaaggtggttcgcgccgggcagcgtgtcgagcgaattgtcgaaaacgacgtgtcccgccgggtcgatcagcgtcacgcgcactccttcgcagggtgcgccggagcgggcgatgaaggcgtcggggggcgcgcccgcattcacggcgtcgagcatccgcaggttgaaaagctgcaactgcgcgtcgagccgctcggccttgaagtgcttttcgcgcccgtactggaaaaggatgaaacaccccaccagcgtccacgaaaagacgagcagcagcaggaacagccgccggtggtaggaaagtttatgcttcaaagccgtagccatagcccaggcgcgttacgatgtgttccccgtaaggtccgactttacggcgcaggcgtgtgatgttcacgtcgaccgtgcggtcgaggacgatcacctcgtcgctccagatgcggcgcaggatctcctcgcgtgaaaagatcacgccccggttcgagagcagcagagccaggatttcgaactctttcttggtgagttgcagctccttgccgtcgagcgtgcagactttgcgccggaggtcgatctccagaccttcgaagcggatgctttcggattcggcgcgtgcggcggacgtgcggcgcagtacgctgcgcacgcgggccagcacttcgcggaccgaaaagggtttggtgatgtagtcgtcggctccgatgttcagcccggccaccgtgtcgtcctcggagtccttcgcggtgcagaagatcacggggacccgggccgtttcgggatcggctttcaggagctgcgccatccgaaagccgctcatctcgcccatcataacgtccagcaggatcagcgaatagcgttcgggatgcatccggagggcctgctcggcgctgtatgccacgtcggcttcgtagccttcgacttcgaggttgaattgcaggatttcgcacagcgactcttcatcgtcgaccaccaggattttgtgttttgccataaatgcgggtttgagtccgcagcaaatttacgcatcattcaccgatgttgcatgcccccggcatgacatttaaccgaaatgtaatgttgtctcatgcgcttttgcggtcaagaagcgcagggggcttttgccggatgcctgcaaaaacccgaaaaggcccccggaggccgggagcctttcgtgtcgggcgacgcgggagagcctatttccccagcacctccatctgctggcggatcgactcctcgtggatggcctgcaggacggtgcgcatgaactcgcggtccatgcccatctgcccggcctgcccggcgcggcgggccagcagctcttcgtaacgctgcgtttgcaggacgggcatgttgtgctcctttttgtactgtccgatgtcgcgcgagacgcgcatgcggcgcgagagcagctccagcagctggtcgtcgagcttgtcgatctgcgaacgcagttcggtgaggctctcggtggtgatcgactcgtcgcggatcaccaggttgcggatgatataggccagcgcctcgggggtcacctgctgggccttgtcgctccaggcgcagtcgggcgagcagtgggcttcgatgatcagtccgtcgaacccgaggtccatggcctgctgcgacagcggggcgatcagctcgcgcttgcctccgatgtggctcgggtcgcagaagatcggcaggcgggggagacggcggtgcagctcgatgggaatggcccacatcgggtggttgcggtagaggctcttgtcgatcgacgtgaacccgcggtggatggccccgatgcggcggatgccggcgttgtagatgcgctcgatggcgccgatccacagctcgaggtcggggctgacggggtttttcaccagcaccgggacgtccgttccgcgcagggcgtcggcgatctcctgcatggcgaaggggttggccgccgtgcgtgcgccgatccacagcaggtcgacgccgcctttcagcgccgtggcgacgtgctcgcgggtggccacttcggtcgaggtgtacatgcccgtttcgcgtttcacgcgctggagccaggcgatgcccgcctctccgacgccttcgaagccgccgggtttggtgcggggcttccagagtccggcgcggcagatgcggatgccttcggctgccagcgagcgggccgtgtcgaggacctgctcttcggtttcggcgctgcacgggcctgcgattaccagggggcgccgggggtcgattcccgggagtgtgatgggttgaatgtcgttcatggttgcgttatttttgtttgtttttttagtgtctttcctttttccggctgcttgcggtgcgcggcgttccggggcgtcagatcgcggggttggggcattcggcgtattcgccgagaatgcggaagtcgctggtgagaggccgtgcggcgtcgatggcctgccggtaacgcatcgggtcgtcgaacgtcacgtcgacgtagaagcggtattcccactcgcgcccgatgatgggcagcgactgtattttggtgaggttgatgtcgtagaacgagaggacggtgagcaccttggagaggctcccccgggtgtgcggaagggtgaagagcagagaggctttgtcggtgtgggcgggatcggcgaattccgcggcgcggcgctcgtcggcgagcaggaggaagcgtgtgaagttgtgtttgttggtctcgatgccccgccggaggatttcgagtccgtagagacgggctgcgtcggcgccgcagatggccgccgtgcctgcgaggcgtccctcggcgatttcgcgcgcgctgcctgcggtgtcgtccctttcgacgatcttcatgccggggagggttttcaggaaatcgccgcactgcatcagggcgatcgggtgcgagcggacttcggcgatgtcgtcgggcgtctgcccggggagggccgccaagacgtgcgagatgcggagtttctgttcgccgatgatccgggcgcggctctgttgcaggagctcgtggttgggcagcaggctgccggcgatggtgttttcgatggccgcgatgcccagcagcgccggatcggcggccatccgggcgaacaactcgtcgaaactcaagcagggcagcacctctatttcccggtctgcgaaatagccgcgcgccgccgtttcgtgatagcatcctgcgatgccctgtattgcgatttgttccataatggtttgaaaaagaaaatcccgctcaaccgagcgggattttcgtgtcatattaatctatactatctgtatacagttaattgcatgcgatcccgctttttcccttgctataaaagaaaaagtaataaaaatagtatgcaaaaccgtatgctctcatcattcgatggcttttatcgttggcaaatgtagcgaaataatccgtaaaaccaaacgtccgccgtattttttttgcgaaaaaatcagcccttgcggtgccggaaccgcttgcgcaactgcttgcggcggccgaacgccagccggaagaaggtcccgcgcagcagcgtgtcgtcgacatcccatccgcgcgtttcggcgtagcggtcgaggatgtagaggaatgccacggcggggcaggacaaccgccggaggttgatcatgcaggcccgggaggaaaggggccggtcgtcgaaatgcatgcggttgatgtcgatcagctggaagcggtaggcgcccgcgggggtgcggtcccagaggatgttgccgtggttgaagtcccggtgctcgatgcctttctcgtggagctgcacggtgaagcgggcgaaggcctccagcacgggcagggtccccgctgcggggaagcgtgcggtggtctgcgacagcggggtgtagtcggagcgccgcgagacgtagtagctgtcgcagagcagtccgcggcggcggtattcgctccatgcgacgggttcgggcgaatcgacgcccagcgcccggagccgcacggcgtgttcgtacgagcggcgggccttgctccggcggaagaaggtgtagatgacggcccgcagcaggttcgggcgcttgaaccgtttgacgaccagccgttctccctccgcctcgaaggctttgatcgtgttgcgtcccgcgtgcaggacctcgccttcccggtcgaagagttcgggcaggcgttccgcgaagtcccgcaggtgttccgaggccgtattgacgtgaatgtgcattgcggtgttttttctgtagcaaaggtacgcacccgcggcgtaaggcgttagtcctgtttgattgttaagttgttctgaaacggaaaagaaaggcggatttcatcgggtggcgtgcggagaacgcgctccttttccccgaaggccgggtgcggttccggacgggcatgaaacgagcggaactttttccgctcgttttcgggatttatctcatccggatgtggaacgctttggggcgtgtcatcgtcttcgtggaggtgcggccgaacgagtcggcgacttcgatgcggacggtcgtcgcaggtcccgaggcgcggtaacgccacatgtgggggttgcaggccgtctggaacggtctggtgccgcgcatgtaggtgatcttgtgcagccgaaatcgttgggcgtgaccggtctccgggcgaagccctcggccgcggcggccgtcgccagcgacagcgcgcagcaccggtttttcggaaacgggtttccgtggggcgcgttatttcgaagaggggtcgaatacgaagatgttctggtagtgtttcgtattgtcggcggtgattccgcgggccgtgtatcccaggtagagcttgtccttgcagaccttgatgccctcggcttcgagcgtcccgaacaccgaaacgccgatctgggtcagtttgtccttgtccaacacgacggccacctgcgtccgctcctcgacgatgttgccctcgaagtcgaacaccgtgacgtaggcgaacgagctgcccgagtagaacgagccgaagaggttgtagttcgactgcccctcggtgtagtagagccggtttttgtggacgtcgtagccctgccagtcgtagtaggtggcgccgctcgcgccgtatcccgtcttgaggaagcgcggccgggcgacgggcgtcagcgtcgtgaggtcgtggcagcgcaccaccacgctgaccgagttggtcgaagcgggtctgtcggtctggaagccgtcggtgcaggtgatcgttacgttggtcatcggggcctttttcgcctcgctcaacttgtagatgacgaaacaccggtaggacgaatttttgctgtcgccgtagttgatcgtcagcaggtcgttctccgcgtcgatcgaggggtgcaggtcggtgtagtcgccgatgtaatagtagtcgttgcactcgttggtcttgacggtggctcccttcacgtatttgacgcgccccaccagtttttcgttccagtactggcctttggcgttgcagacgccgtaggctccggcccacaggtaacggtcggcgccgtcctcttcgagggcggtgttcgtcccgtggccgaagtaggtgagtttcatatagtccttgttctcggtctgcacgtccggggtcttgttgggctgcgcgcggacccagttcagctgcgcctggttcgtgttggagagctgcgtgtaccagaccgagccgtccgagtcgaggttgaagccctgcatcgccgtgttgtccggcaggtaggtgttccggctgaagatgttcgaggcatcgaaccggtcgatgcccgtggtcgacgatttgtcgggaccttcgggtttgccgggaccgggcgtttcgccgccgtctccgtcgccgccgcaggcggtgcagagcgagaggcccagaatcgaaataagcgtgaatttcaacagtttcatagcatgtcgttttagttgcggtaaattaggtattgccgcccgaggcggcaatacctaataaaacctgttgtttctaatttgtgattatcggtctttcgttacctggatgtcgtcgatccacaggcggtagtgcttggttccgtaaggatgcgccgcgattacgatgcgggtctccttggtggctccggcgatcttgaccacatgctccgtgggatttacgtagtcggtcgtgggaattttgtcgctgtccacgtgcgtcgtgcactgtacggtcacctgcttgtccgtgttggccgtggcggcccctgtcggttcggccttggtcgggcctccgtcggtgatggttccgggaccttcgacctggatgtagtgctgttcgtggtcctgtccccacgagtggtacggctcgaagtagggcgccgtgtggcacgttacggtgatgtcggccgttccttcgccgattccggtcagcttgggcgtcttgatgtagcccgaaacggatgcggtcgagagcagtgcggctccggtctgggtgcgtacccagaagccctgccagccgggatagtcggcgtcggcgtagttcgtgccgtaggtgtcgccttcccaccatgcttcccacagtttggccgctttcaccggaccgcggttgtcggtcgcgctcccgacgtagttgaagaacgagtcggtggagttgacggggtttacgatttttccggtggccgccgggcagttcgggtcgtcggggtcgatgtttgcaccgatctgggcgttggtgacttcgacgccgaatgcctggtagatcggacagcctctgaaccagaaatcgtcgaaatccttgtagaggatgacgttcggcgccagattctcctcgggagtggtgaacgacagccacgttttgtccgaatcctccttattgggacccagctcgtgggcgacgatccagaaccagtaggtcgtgccgggttgcaggttgccgaaggcgaaacggttgtgcgcgaagaacatgctgctggcggtgagccaatcggccgtcttcgaggtgtagttgcgcaggttgtcgccctcctcttccagcgcgaggccgaagctgaacgagcggggcgtgccgttgttgaagttcgtgccggtacccttctcgtagtcgccccagtcgaggactgccaggcggggcagcagtttgaacatcgtgacggttacttcgccggccagtttggcgcggctctcggcggtgaggtcgtagggggtcgcgacggacgagatctccacgtgcagtttgaccgtgatcgggcctttcttggtcggcgttccgctcaaggcgaggggaatcgctccgtcgcccgcctccatttcgtatcccgagagcgattcgatggcgatgccttcggctcccgcgccttcgagcgttgccgtgacgtcggccttatagccgggcttcgatttctggtaggggatcgtcacccgcttgtccacgagctcctcgtagaggtcgaaactgggggcgatctcgggcgagccgacggtgaagaatccgtcctcctgcgtaacccggatgaccagttctttcagtccgtcggagagcgtgacgctgccggtacgctccgcgccgtcgttctgcgcgacggtgatgttcaccgcctgttctttcggcgcgccgttcccctccccgggcgaacagctgatccacgtgtcgtcgggcgtgattttccaggacccgttggtcaggacgagcagctccttcgtcgaattgaggtacgggaacgagagcgcgtcgtggctccgctgcaggaagtgggtttcgtcgtccttgcaggatgtgccgagggcgaccgacgccaggcacaaaaacgaaattatagcgtgtattttcataaaatcggatttttgatcgtttcgggtaagcgggttagtcgtcccagccgggattctgcggccgcaggttggggttgatgtcgagcgcattcttcggaacggggtagaggtacttgtagtctgcccattcccggtcgagaatgtaaaccaggcagttgtccttgttgacactgtatgtcgtgacgttgtcgccctcttcggcggtcacctccacgtacgaaaccccggtctggttgctgcccgatttgggatggctcttcgagtagaagcagaggtcgttctttccgtcgccgttcatgtcgaacggcttgcccagttcgggaatgtggatgccagcgaattcgaccgtcagtttgtggcccatgcgccagcgcatcaggtcgtcgcgccgggtgttctccatgtacagttcgatgctccgctcgcggcggcattcgagtatccacttgtcggtcaccccgtcgtagtagctggccagataggggtcggccgtggcgggcatcgcgccgcttacgcccgaacgctcgcgcagcgggcggatcgtcttgttccacaccgtctggtccatctcgcccagttcggccttggcttcggcctcgttcagcagaatttcggcgtagcggaacaccgggagcgagttggcgctggaggtgttgctctcgttcgcatcgtcgtcggtgttccacttgatgatgcggtagtaggtcagctgcgtggtcaggccggggaagacctttgcgaattcgttggtctccttgccgccgaccttcttgacgtagtagggcgtgatgaaggtctggcgcaggcggtagtcgcggccggcgaactcgtccttgaactgcgtcttgttgtatccgtccttgtccgtgaagcgcgtcccgtcgaggttcaggtacatgttgacgaacgctttgggacccgagttgcgttgtccgtagctgcccgaggcgtagtaccacgaggcgtcgtgaaaccggttgagcgtggcgttgaactcgttggccaggatcacttcggtgtactgcggctcctcgctcttgaagaccttgctgtaattggtcgtctcctcgccggccgtcgagaccagcgaataggggctgtcgcccatcagctcctccgaggcggcgacgcacgcgcggagccattcctcgctgccgtccagcccgtggtacttccgccaggttccctcgtagaggcagatgcgcgatttcagggccagcgccacatagcggttgatgacgttggtgttgacgtatttgctggccttggagcaccaggtggcggcgaagtcgaggtcttcgaggaccttctgcatgacgtagtcgcgcgggtcgcggcccttgtagagctgttcgtcgtcgtcggggtcgatcggctcgtcgtaccagggcacgtcgccgaaggtcttgaccttgtcccagtagaaccacgcgcgccagaagcggccgacgccctcgtaatgcttcattgttgcgtcgtccacatagggggccgcgtccttcatgtgcttgaggtaatagttgacgttgtagagcggacgccagttgccccgcgcccagttgttggcctgctgggcgctgtaaccgcccgtcttgaggaatccttcggtctgggtcgtgacgcagatgtcgctgtactggtcgccgcgcgtgagcgtcgcggccgagggcaggtggctttcgagaaagccgatcgcataggtttccagcgccgtttccgaattgaaaaaggtgtcggtggtcgtcgaatagacggggtcttcgtcgaagaagctctggcacgaggccaggagggacaatccggcgattatcgctatcttgttcagtatgggtttcatgggattgcgtgttagaagttgatgttcagtccgatggttacgcttcgggtcatcgggtatccgtagccctggccgtcggtgccggtcttcgatgcgaagtcggcgtcgcccgccgtgatcatttcggggtcgtagtttttggcgtacttcttcagcggcgaccagaagaacaggttttcgcccgagacgtagatgcgcagtttctcgatgtgggccttgcgggtgatctgctggggcagggtgtagcccagcgagatgtttttcaggcggcagtagcgcgctttctgcaggtagcggtcgttggcggcgcgcagcgtgccgcgtccgctgacggccagcgagccgcgcagtcggggccagtatgcgttggggttgtcctccgaccagcggtcggcgttctgccacggcaggctgtatccgtaggggcggtcgtattgtccccagaagagccccgactcgccggcgggataccagtcgcgtttgccgacgccctggaagaagaccgcgaagtcgatgccgttccagtttgcgctgaagttgatgccgtagtgatagcgcggcgaggagttgccgatcttgcgcaggtcgccgtggtcgtcgaggcggttgctgccgttgtccacgacgccgctctcgtccaggtcggcgaatttcaggtcgccggcgttccacgacttgttgtcgccgctccagaaggtcttctcctgtgccttgagaccccactcctgcgcctcctcgtcggtggcgaaaagccctacgacgtggtaaccccagatctcacccagctccatgccttcgtagtaggcgttggcgtagagcgtgggcagggtgttcgacttgctggtgtatttggtgatgatcgacttgctgtcccagagcgagaggcgcacgctgtagttgaagggtttgttcgccacacggaaactgtcggtccagcccagcgaaacctcgaaaccgcgggtgcgcatgtcggcgttgttgccgtagggcgccgaatagcccgtcacggccggcagctcggctccggtgacgaacatgtcggtcgtctccttctggtagatgtcgcccacgaagctcaggcggttgttcagcaggttgacgtccagtccgaggttgatcgtcgaggaggtctcccacgtgaggtttgccggcagcacggacgagggcgccgaggtgtaggtgcgctggctgccgtcgacgatcacgccggccttgttgaagtccaacagctccatgtacttgtagggcgagacgttgccgttgccggccttgccgatcgagaaacgccatttgatgttgttgatccaggagatgtccttcataaagttctcctccgacatccgccagcccacggaggccgacgggaagaagccccagcgttcgttgctcgggaatttcgagctgccgtcgtagcggccgctcaattccgcgaggtatttgcccttgtaggcgtagctggcgcggtagaagatgccgacgaacccccagtcgtagctgttggcgtcctccaggacgtagtcgatgccgttcatcagcgagtagttgggtttgccgtcgacgatgaatccgtcgcggcccatgcgggtgttgcgcgcccgcttgtgttcgatgttccatccggccatgacgttcagcgagtggtcttcgggcagccgcggggtgaacgagaggttggcgttgccgctgtggtactcgatctgcgtctcggtggtgcgcatcgagctgctcgccggataggagatctggatacccggaccgttggagtaggtgacctgcgagatcacgtcgttctggcgcgagtggttgaacaggtaggagtagtcggctttggccaccagcacgtccttgatcaggtcgatggtcacgacggtcgtgttcttcatgtcgaacttgaggttgtcgcggtaggagttgccctcggccatgttggcgtaacccgtgtagacggccgccgcggtccacgtcccgtcggggttggtgacgcgggtgatcgggaatccctggtgttcgaggttgcggcgcaccagcaggttctgcgcataggtcgtcggctggtggtagctgcggcgcacgaagtcggtgttgttctccacggtcagccatttggtgatgttgaccgtacctttggcccgggcgttcagctggcggaatttctcgtcgccgacgcggtagatgccgtcctgctcgtaatagcgggccgaagcgatgaaactggaggttttgccgccgcccgaaatccggatgttgtgctggtgggccgtggtcgatttcttgtagaagaggtcgtaccagtcggtgttgcgtccgtaatactggtatttgccgctggcgtcgagttcccattccagatagctccggtcggggtcgttcatgcgttttttgtactcgtcctcccagctctgcgtccagggaaagaagttgttgatgcccgtcggcagatggtgcgagtagcccacgtaggcggtcatgtagttgtcgtaccaggtctggctgtcggtctcgtatttcgggcgtacggtctcgctgatgatcgaaacgctgccgctgtaatcgaccgaaatcttatccttgcgggcgcttttcgtcgtcaccagcaccacgccgaacgcaccccgggcgccgtatacggccgtcgaggaggcgtccttgagcaccgagatgctctccacgtcctcggggttcatcgccgtcaggtcgccctccacgccgtcgatcaggcagagcgccgatccgcctgcgccgatcgactgcgtgttcgcacggatgttgatcgacgccgaacggctcggcttgccgtcggccatcgtgatgttcacgcccggaatctggccctggatcgaccgaagcagataggcgttggggcggttttcgagcacctcgcccgaaatgttctccacggccccgacgatgttgcgccgccgttgggttccgtatcccacgacgacgacctcgtccatcaggttctggtcctcggtcaggacgacctccagtttggtgcgggttccgaccttgacgcgctggctcttgtagcccagataggagacggccagcatgtcgtcgggtttggcctgaagcgtaaaggctccctgcgcatcggtcgaagtgccctgcgtggtgccttcgatgaggatggtgacgcctgtgagcggctcaccctgttgggatttcacggttccggacacggccttgctttgggcgaggacctgtcccgtcgccagcatcaggaggatgaaaattccccccccccgagattttccggcggattgcggatcggtagttaaaaagattcatatacgaggttctttgaagtgtttgggtcagagttcggtgtgtttcggggcgcgggtcgtcgtccggacgatgcagtcgcgcagccgggtcagctgttcgggcgtggcggtcagccatctgtgccgtccgtcgggaccgggggtgaaattcgtgaatcctttgtcgtcgacggcgacggttcccggctcgctttcggtgaagtattcgggatggagcaggtaaaccaccgacagcaggtcccacgacgcgcggtcatagggcatcttgtggtaattcttgtagccctcgacgacgggatggagtttcgcccagccgaaatcgttctcgatggccgcaccgggatacatgacctgctttcccagctcgaaggggttctgcacgatcggcgtgtcccattcggcgaagagtttccgcatggcggggatgtcgttgacgacgttgaactccgcgcgctgcttctcgccgtagctgcccgccatgatcgagagcgccttcaccttgcgggccaccagttcgcggcccgtgaggggcgagatgtcgtcggccgggctgtcgaggagttttgtcagttcggtcgcgaatcctaaagaaagtacggttaccgagcggtcgggctgcgcggccagcgtgcggcggtagagcgtgacggggtcttcgatctgttccggggtcttgctccgggcgaaggccggggagccgtcttcgcgggtcatcgcgcacaccgccgccgtgtagtcgggagcgtggtcgttgagcaccggggtcggcgactgcgccagcggaatgtcggggtagccgtaccacgtgttgaggatgtcgatgtagtcggtggccgtcgggctgagtttgtggttgccgatggcgagcaggtctacgcgtccgtcgtccatcgccttgtagatcaggtcgaaggccagtgcgtcgtcgatgtcgtttcccatgtcggtctcgacgatcagccggatcggttccggtgttgcggctgcgggtcgggagtcgcaggccgtacccgcaagcagcagggcggccgctgcggggagcagtgaggttttcatttcggattcgggtttttagttgccgccggaggcgatgatcgaagccagtccggcgatgaagaagaggaacatcacggccagcagcgtgttggttttgcggtcggcgcccttgaactccttccagatgaagacgccccacacggcggcgatcatcggcgcgccctgtccgagcgcgtaggagatggcggccccggccttgccggcggcgatgtagctgaaggccgttccgagacaccagacggcgccgcccagcatgcccacgaggtgcgtgggcagcgagccgcggaagtactcgcggtagctgacgggcgctccgacgaagggacggcgcatggcgtaggtgttgaaggcgaagttgctcagcagcacgccgaccgagaagacgaagatcgccgaatagggcgtcagcatgccgggcgtcggggccgcgaagttgtcgaggtccatcgccgccgcgacgaaccggtagaagaacgacatcagcacgcccgccacgacggccagtatgatgcctttgcggttctgggccgccgagtcgccgctcttgcgcatgcgccccgaggcgatgccgttgcagataattgcgacaacgatgagcgcaacgcccaggaagaggatggcggggtcgcctttcggcgctccgacgtagttgacgatgacgcccagcaccagcgcgagtcccacgcccagcgggaaggccaccgaaagcccggccagcgataccgaggccgagagcaggatgttcgaggcgttgaagatcacgccgcccagcacgacgctgccgatgcctccccattcggcctgcgcgaggtcttcgaggaagggacggccctcggtcccgatgcttcccatcgtgaagcccaggagaatggcgaagagcaccatgccgatcacgtagtcccagtagaaaagctcgtaacgccaggtcttgccggcgagtttctgggtgtttccccacgagccccagcagagcatcgtgatgaagcagaagatgactgccaaagagtagctgttaacaacgaacatagtatttgagttttaaggttttcgttcggttcaggcgagggtctccagctccccgcgccacggtatcgaggcctgtgcgcccatgcgggttaccgagaccgaggcgctgtgtgcggcgaaccgcacggcgtcggccagactgcggccttcggagagcgccaccagcagggcgccgttgaagacgtcgccggcggcggtcgtgtctacgggcgtgaccgtgcgcgccgggatcagcagctcctccgcgggggtccggatcagcgcgccttcgctgcccagcgtgacgatgacgttgccgacgcctttcgccagcagcgccccggccgctttcgaggcgtcctgcacggtgtgcacggggattcccgtcagcgtttcgctttccgtgcggttgggggtgatcaggtagaccttgcgcagcagttcgtcgacgagcggcatggccggggccgggttgagcactacgcgggttcctgccgcatatgccttttcgatggcgcaggccaccgtttccatcgggatttcgagctgtacgagcaggtattcggctccggcgatgcggtccgccacggcgtcgatcgcctcgcacgtgaggctgtggttggcaccgggagccacggcgatgcagttctcgccgtcctgcgagacgaagatcagcgccgtaccggtcggggtgtccttggccgtgaagagggcctcggtgttgatgccgtcggcggcgaactgctgccggagggctgcggcgccggcgtcgtcgcccagacacgagacgaaggccacgtcgccgcccaggcgcgcggccgcgacggcctggttggcccctttgccgccgttggactgcatgaagcgcgcctcgccgacggtctcgcccgggcggggcagatgtttgacgcaggcaatcatgtcgatgttggtactgcctattaccagaatcttgttcatgttcggttatcgttggttaatttctgtcgttttttcgccctgcggggtccggatgcggctcaaccccgcggagatgcggtttttcggttttcaggtcgtccgccgattgtccccgatgccgtttcttgccgttttgcgcccgttgttttcatagggtgtctttgcagaatacggttcttatgggggctgtggcagatgttcggttttcggatgctatctttttagccctgtttgcgcttatcgtttgcgcaaatataattactttttggaaacctccaaaattattttaccgtttttcttttctttttcgatatttttcatatatttgtcatgggtgaactgaaaataaagcaatgaaaaaagaaactctcgttagcatcgccgaacgttccggatgttcgatttccactgtttcgcgcgttttgagcggcaatgcggccaaataccgcatcagtcagcgtaccgtggcgcgcgtgacagaggaggtcaaacgctgcaactatacgcccagcctgctggcaaagggtttacgcacaaatcgtaccgatacgatcgggctgctgattccgaacatcgagaattcgtttttcgccggcgttgcgggcgtggtgatccgcgagtcgcgcaattataattataaggtggtggtggtcgacacgcaggaggacgagcgcaacgagcaggacggactgtcggcgctgctggcgcggcgggtggacggcatcgtcgccgcgccgtgcggcagcaattcggagctgttcgccagtgtgcaggagggcggcatgccgctggtgctgatcgaccgctatctgcccgacgccgggatgctctcctatgtcacgacggacaattaccgcggtgcggtgatggcgaccgagtacctgctcgaaaacggacaccgccgcatcgcctgcatccagggcacgccccattcgatgcctgtgcgggaccgcgtgcgcggattcggcgatacgctgcgtgcacacgggctgggcgatcggatcgtggtgacgggcgaggatttttccgtacaaaacggttatctggagaccaaactggcgctggcccaggccgagcggcctacggcgatcttcgccttgagcaacctgattctgctcggggtggtgaaggcggtgcacgagtcgggcctgcggattcccgacgacatttcggtcgtttcgttcgacgacaacatgcttttcaactacctcgatccggcgatcacctgcatcggccagccgacggacgagatcggcacgctggccgtgaagctgctcatccgcgccgtccgcgagcccggcgcggcgccttcgcacctgcacctgccgccgtcgctgatcatccgccgctcggtgcgcaacctgctgctgtgagaaagcgaaaagcgcaccgtatttatccgggttattgtttgataagggtatgccttatgccagaaccggcataccgcatttttcaggatcaattcattttcggtcaattcaatataaaataaagcgctggccgatgccgctaacagtatgatcaacgggataaacggaatgagcagtaaggagcttttttccggaacataaaggattgttaatggaattatgcatgcaaaagttagaataggtataaaacaagcccagatcgttaccgaactccaaatcgaacgcttataagttttcatgtttattgaggatatgatgcaatccgggagtttccaccgtgaagcccttctcgcgtaatgtttgaattaaatccggataatctcgttcatcgaccaaatcggtcacataacgccatgatttcttcgccggcgtcatcacctgaatataaggccgcgataatccgcccttatagccgatttcaattttttcaatagtattgaattgaaattcagcataccagaagcgatatgccggattttggacaatcaatgaattctccgttaaaacaacataaaataattgagttgcagtacacgctacaataaaagacaggacacaaagttcaataacaagaaaaacaagaaagcctttcagatttccaatcgtcatcaataaaaacagggccaatataacaacgatcggttttaaagtgtacattgaagtagactttttgatggaacggcggtaaattttcataactgtcattatctaactctatgtcttttttattgagatttacggattgatagaatttgttcggagcttaatttcccgtcaaggaaaagacgctgctcttcagtcaaattcgctcccgggaattttttaggtttcaatgtctttaagaattcatacctatatcgcaattccaattgggaataaatctctatatcggaattccctttgcgatagtcggctgtgaaattcccgccggccgtcgaaaataccccataggaattcgaataaagtccgcttgcaaactttccgtcaacaaacagtccttccataaaataatatttacgtcctgaagccttgtggatatataatatgccgtctccgttcggtttgccttttacgcagactccgacatagatagactttttgtaccagatcgtatccgttccaaaacagtgtccgtttttgaaatcaccgacgcataccgctcccgatttccagaactgtataccccgcccggaatactcgccatccttgaattcgccgtagtagcggtgcccgttctttttgtaatgcgtgcatactccgttggggatgccccgctcgaaatggccgatataaatgcccagcgaatcggaatagagcaccccttcgccgcaagggtattgaccctcgtagcggattccgtttccaacgatgaccgtgtcgcacacggcgccgaaggaaaaattcgcatacagcgaaacgagactgaagataaataatttatacatatccgtatatttttaggatttgtattattgagatgctattattattcccgcttcccccccccctcccccatgttccgatgcaagtcctgccacaaaatggacaggcggaattatgacattggcaagggacgctatgacacgcagactgtaagataatgataaatgttgctatctgcaatatatggtcaaaaaatgtaaattgaaaaatgatctgatttgtttgtaatcagtgctgaatcagtatccgtcagtctcgtttggtaaattgggcaatacgatattgcaatgctcgtttgctgatgaaagagcggagccggaccctgaaaagcagtatcccggagatatgggatgactctttgccgcctttgcgattgattgttccgctcctatttatagcatgacggacatcagatgacgaggcgcaacgtaaatgcggatagacctggatttgcgttgtttgcggcgcgcgtcccgatctgtcaggattcgggcgaaaaatcgtcccgaatcgggcctttttgccctatgtgcatgaaaaaagcggctgccctgttcggtaaccgcttgattcctcgagctgacaccgggacttgaacccgggacctcttccttaccaaggaagtgctctaccactgagctatgtcagcaacatttctctttcgagtggtgcaaaagtacataagaaaaatgaaaagaccaaaaatttgtacacttttcataattattttctacctttactaccaaatcataataaaaaccagatgaaacgcatcttaatagtaggcgcaggcggtcagatcggttccgaactgaccgtttacctgcgcagtatctacggcggctcgaacgtcgtcgctaccgacatgcgcgagtgccggtcgctggccggggacggtcctttcgaggtgctcaacgccctcgacgcaacggccatggcctcggtcgtggcccgtcaccgcatcgacacgatcttcaacctcgtggccctgctgtcggccgtcggcgaacgcaatccccagatggcctggaacgtcaacatgggggcgctcaacaattcgctcgaagtggcccggcagcaccattgcgcgctgttcaccccctcgtcgatcggcgccttcgggccgtcgtcgcccaaggacaaaaccccgcaggacacgatcatgcagccgacgacgatctacggcatctgcaaggtcacgggcgaactgctcgggaactactaccaccacaaatacggcgtcgacacccgttcggtgcgtttcccgggcatcatatcgagcgtcacgctgcccggcggcggtacgaccgactacgccgtggagatttattacgaggcgatccggagcggcaaattcacctgtcccgttccgtcggacgtctacatggatatgatctacatgcccgacgccctgcgcgcctgcgtcgaactgatggaggccgaccctgcgaaattgatccaccgcaacagcttcaacctcgcgtcgatgagcttcacgcccgagatcatctgcgccgagatcaaaaagcgtctgcctgccttcacgatggactacaacgtcgatcccgtgaagaaggagatcgccgagagctggcccaattcgctggacgacacctgcgcccgcgaggagtggggctggcggcccgagtgggacctctcgcgcatgaccgacgacatgctggcgcacatccgcgcgaagctgggtgcggaataagtgaaaagaggcggcgatttcggccgcttcggcaactgaacagcctatgaaacgaattgtccggatcgtcgttgtctctgtgctgttgcttgcggcaattgtcgcgggcggcagtctctacatgctctcctattcgctccggcccgatgcgacgatgcgggccaagaacgcttcgtcgtatgaatatatgtacggcgaatatcctttcctgcggccgtgggtcgacagtctggagcgcaccggggccttgcgcgacacggtgattctcggttcggaaggcgaacggctgcacgcgatctatgcggcggctccccgtccgacggaccggacggcggtgatcgtccacggctatacggacaacgctgtgcggatgctgatgatcggctatctttacaaccacgacctgggctgcaacatcctgctgccggacctttattaccacgggcagagcgaaggccgtgccatccggatggggtggaaggaccgcttcgacgtgctgcggtggatggacattgccaacgacatcttcggcggcgacacacggatggtggtccacgggatttcgatgggcgcggcgacgaccatgatggtctcgggcgaggagcagcagccctatgtgaaatgtttcgtcgaggattgcggctatacgagcgtccgggaccagttttcgaaagagcttaaagagcagttcgggcttccggcctttccgctgctcgacgcggcgagctggctgtgcggcctgaaatacggctggactttcggcgaggcttcgtcgctggagcaggtgaagaagagccggctgccgatgctgttcatccacggcgacgccgacgattacgtgccgacgcggatggtctatccgctttacggggccaagcccggcgacaaggagctgtgggtggttccgggagcgtcgcatgccaattcgtaccgcgacaaccgggaggagtacacgcgccgcgtcggggagttcgtggggcggtatatcggcggccggccggagtgaattgagccgccctcgatgtggaagcgtgtgatttgcagcaggcgcaggccttctgccggattctggcggagaccgtcgggaaacttccggccgaagtgcgcgggcggctttaccgcccggccgccgagaactgcgtgaaagggacggtcctgacgggagccgttggacgaacgaaaaaaccggaggtctgaacctccggttttttcgtttgtcggaaggaacgctccttccggcgggaatctcttactcggctttgccgtccgaaccgagaacctccttgatcttgtggatgtagagcttcttcatgttgtcgcgggcgggacccaggtacttgcgggggtcgaactcggcgggtttggtggcgaagacctcgcggatggcggcggtcatggccagacgcgagtcggagtcgatgttgatcttgcagacggcgctcttggcggcctggcgaagctcctcctcgggaatgcccacggcagccttcagcgcaccgccgtacttgttgatcgtctcgacttcctcctggggaaccgacgacgaaccgtgcagcacgatggggaagcccggaagctccttctcgatggcggccagtacgtcgaaagccaggggaggcggaaccagacggcccgtcttgggatctacggtgcactgctcgggggtgaacttgtaggctccgtgcgaggtgccgatcgagatggccagcgaatcgacgcccgtcttggtcacgaagtcaacgacctcttcgggcttggtgtagtggctgacttcggaagctacctcgtcctcgacgccggccagcacgcccagttcgccttcgaccgtcacgtcgtgctggtgagcgtactccacgacccgcttcgtcagggcgacgttctcgtcgtaggggagcgccgagccgtcgatcatcaccgacgagaatcccatgtccacgcagctcttgcacagttcgaacgaatctccgtggtcgaggtgcagtacgatctggggtttggcccagcccagttccttggcgtactccacggctccttcggccatgtagcgcagcagggtctggttggcgtagttgcgcgcacccttcgatacctggaggatgacgggcgacttggtctcggcggcagccatgacgatagcctggagctgctccatgttgttgaagttgaatgccggaacggcgtaacctcctttgatggccttggcgaacatctcgcgcgtgttcacaagacccagatctttgtacgataccatagtatttgaaatattagtgaatttgttgcactcaaaaaaccgcacaaatttactaaaaattctaaataacaggccttttttgtgaaaaaaataacagacgaaccgggaaatcgttgtacaatccggattgtttttcgtaaatttgcagggattttcggatgggcgggacatgcgaccgcattttccggccgcatgcggcaagtccttcccgggaacgggtttcgggcgggccggatttgcaggcgcggctgaaggccgcgaatggacggcggtccgcggcgggcagacaggaagcaacatacaaacattataaatactatggcagatttcatctatcaggagccgttccccgtgggggaagacaaaaccaagtaccgtcttttgacgaaggagtacgtgaaggtcgtggagtgcgacggacgcaagatcctcaaggtcgatcccaagggcctcgaactgctttcgaaggaggcttatgccgacgtgtcgttctacctgcgcgccgcgcatctccagaaactgcgcaacattctcgaagaccccgaagccaccgacaacgacaagttcgtggcctacacgatgctgctgaaccagaccgtctcggccgaaggcgaactgcccacctgccaggacaccggcacggccatctgcatcggccacaagggcgaggatgtctggacgggggccgacgacgccgagtgcatcgcccggggcgtttacgagacctacaaggaccgtaacctgcgctattcgcaggtcgtgccctttacgatgaccgacgagaagaactcgggcacgaaccttcccgcgcagatcgacatctacggcggcaagcccggcatggagtacgagttcctcttcatcaccaagggcggcggctcggccaacaagactttcctctaccagcagaccaaggcgttgctgaacgaggagtcgctcacgaaattcatccagcagcatatcttcgacctcggcacgtcggcctgcccgccctaccacctggccatctgcatcggcggcacgtcggccgagatgtgcctttcgacggtgaagaaggcttcggccggctacctcgacgagctgcccacctcgggcaacgagggcggccgctgcttccgcgacctggaatgggaggagaaggtgctgaaaatctgccgcgagagcggcgtcggcgcccagttcggcggcaagtacctcgtgcacgacgtgcgggtgatccgcgctccgcgccatgcggcttcgtgccccgtggccatcggcgtgagctgctcggccgaccgcaacatcaaggccaagatcacgcccgagggcatcttcctcgaagagctggagaagaatcccgcgcgcttcctgccgaccgaggctccctcgatgtccccggccgtggacatcgacctcgacgagggcatggacaaggtgcgtgcgattctcacgaaatacccgatcaagacgcgcctgaatctgcgcggcacgctgatcgtcgcccgcgacatcgcccacgcccgcatcaagcagatgctcgacgagggcaagccgatgcccgaatacttcaagaagcatccggtttactacgccggtccggccaagacgccgcagggcatggcttcgggttcgttcggccccacgacggccgggcgcatggacccctacgtcgacctgttccagtcgcagggcggttcgctggtgatggtggccaagggcaaccgctcgcagcaggtgaccgacgcctgccgcaaacacggcggtttctacctcggttcgatcggcggcccggcagcgatcctggcgaagaactccatcaagtcggtcgaggtcgtggacttccccgaactgggcatggaggccgtgcgcaagatctatgtcgagaacttcccggcgttcatcatcgtcgatgacaaggggaacgactttttcgccgatttcaagcattaagaacggtcgtttataccatgcactgtttcccgctcccgatcggtgttgtcgccgcctgcggtgccggttacaggttcgaccccaccccaaacccctccttcagggaggggcttggtggcgcaagcggcaaaattggcgtttcggacggcaggtgtaaattagttgcatgaaaaaatactaacgcgcaaaactttgcgttgtaaaattgtaaaaaagaccgtcgtaaggtatgaaatccggcagataatccgggcgaaattccggtcgcgccgcgacaagcccctccctgtggccgtttgagagacggctttcggaagagggtgcgtggagccgggtccgtatcccggcggaccgggcgccgccccttggttccggcttttggccgtgcggagccggatcggcaaacgccggtggcgacagcggccggccggtacggggtgcggcgcgaattgacagacatatcgttttgtgatgagagactttgttgcaaaaatatccctgacagcactcttcgtgctggcgatcttctcggcatccgctgccgagaaggtcacttttgaagccaactcgccgctgacggtcgccgtcggcgaggcgttccgcgtggaattcgccctgaacgccaaacccgacggggatactttcaaggcgccttcgttcgagggattcgacgtgctggcgggacctgccatctcgcaggggtcgtcggttcagatcgtcaacggctcgatgaccaagagcgtcagctatacctacactttcgtgctgctgccgcaggccgcgggcaacgtgaccatcggcgccgcggaggtcaaggtcgatggctcgtcctaccggacccggccgctgcccatcgagatcgtgaacgagggcgaaggctcccgggcgcaacaacagcagggcggttcgaaccgtgcggacgatacgcaggccgatgcccagagccggatcggcaaggacgatattctgctccgggccgtcgtgtcgcgctcgtcggtctacaagaacgaacccctgcacgtggctttcaagctctatacgcgggttccttatgtcaacatcgttcccgagtcggctccgtcgttcaacggtttctggtcgcaggacctctccgatcccaattcggcccgcgtggggcgcgagacctatgccgggaaggtgtacgagacgcgtgtgctgtacgactacctgctctatccgcagcaggtcggctcgctcacgatcgaccccgtggacatgaccgtcgtggcgcaggtcgtggtgcagagccgccatgccgatcccttcttcgggggcggccgcgaggtgttcaacgttccgcgcaaggtgcagagccagcgggccacggtccaagtgaaagcgcttccggcaggtgctccggccagcttcagcggcgctgtgggcaatttcacgatggacacccagttcccttcggaacggatcgcggccaattcgggcgcgacggtcacggtgaagatttccggcacgggcaacctcaccttcgtacaggccccgaaactgccgctgccgacctccttcgagcagtataacgtcaagaccaccgagtcgatcaacacgtcggcctcgggcatctccggctaccgccagttcgaatatcccttcatcgcacgggccgagggcgcttacgacatcgaacccatcgagttcacctacttcgacccccagcgggtgcagtacgtgacgctgaaatcgaagccgctgacgctcgaaatcacgcccgatgcccgcggcggaggcgatgcggtggtgatgcaggggcgcggcatgtcgaaggaggaggtgaagatgctgggccaggacatccgcttcatcaagctgggcggggcgcagctgcgctccgagcgcgtgccgttcatcttcagcgccgcctactggattcttctgttaggtgtgctggcgcttttcacgatgatctacgtggcgctgcgcaagcagatccgcgaatcgcagaacgtcgccctcgtgcggggcaagcgggccaacaaggtcgccgtgcagcggttccgcgccgcgaagcggtatatggaggagcagaaccggcatgccttctacgaggagatgctccgcgcgctgtgggggtacatgagcgacaagttcaacatcccggtggccaacctcaccaaggagaatgtccgcgaggagctgcacaaacggggcgtttcgtccgaggactcgcagcgtttcacggacatcatcacccggtgcgacgaggcgcagtattcgcccgtcgagtcggcccgcatgggcgacgtttattccgagggcgtgaacctgatttcgcgcatcgagtcggtgataaaacgatagttgttatgaagcgattgaccctatttctgatcctgtcattcggcgttccgtgcgcatgggcgcaggagggtatcgacagcacgaaattagcccaaatatcagaggctaaaaccttggtaaaaactgcggtgcaggctgtcgcggaaggcgttgtcgaaggacttgctggtgtttttgatgagcccgacgctgtggaggcttcgcccgaacagctgtgggaccgggccaatacggcctatgtcaacggggattaccacgctgcggcggagatttacgaagggattctcgcgcagggactctcctccgtgaaactctattacaacctggccaacgcctacttcaaggaggggcagctgggcaaatccatcctcttttaccgccgggccttgcggctggctcccggcaacgacgacatccgctataatttgagcgtcgccgaggcccgcacgaaggacaacatcgagcagatacccgaatttttcttcaccgaatggatgcgcggcgtgcgccgtctgatgagctgcacggcgtggagcgtcttctcgctcgcggcgttggtctgcgccctggcgctgttcctcgcctacctgttggcacagcgtttgccgttgcgcaaggcggggttctacggaaccctcgtcgccgcggcggtcttcatgctcacgagctggttcgccatgggcgagcggcgcgagatgctcgacgacacgcaggccgtcgtgatgtcgctctcgacggccgtgaagagttcgcccgacaagtcggcgaccgacctcttcgtgctgcacgaggggacgctcgtcgagatcaccgaccgcctcgacaactggtgcgagatcaccattgccgacggcaagaaggggtggctcgaatgtaaaaccgtcgaaacgatttaaatgtcgaaacttttacaggacgtcgtcggcgaactttcgaagcttccgggcgtgggacgccgcacggcgttgcgcctggccatccacatcctgcgcatggagcgggattcggtggccgagatgacggagagcatcgaccggttccgcaacgagatccgctactgttcgcagtgcaacaacctctccgacgaggaggtgtgtccgatctgcgccgaccgggaacgggaccatgcgacgatctgcgtcgtggagcaggtggccgatgtgctgtcggtcgagaacacgcgccagtaccgggggatgtaccacgtgctgggcggcgtcatctcgcccatgcagggcatctcgccctcggacctgaagatcgacctgctgtgcgaacggatcgcccgcggcggggtgaaggaggtgatcctcgccatctcgacttcggtcgaaggggagacgacgcttttctacctgatgaaccgcctgcggcagttcccggggctgaaagttacgtcgatcgcgcgcggtatcggtttcggcgacgaactggagtatgtcgacgaactgacgatcacccacgcgctgatgaaccgccgggagatcgagtagccggcccgctcgggaggcgggttttaggggacgaatttgtggtttcaataaaataacaacactatggactttgtaacgaacgagaaactcaccatcgtgggtgcggccggcatgatcggctcgaacatggcgcagacggcgctgatgatgcgcctgacgccgaacatttgcctctacgatccgtatggatcggcgctggagggcgtggccgaggagctttatcactgcgccttcgagggggcgaacatcacgtggacgaccgacatccgcgaggcgctgaccgatgcggcttacgtcgtgtcgtcgggcggcgcggcccgcaaggcgggcatgacgcgcgaggatctgctgaaaggcaacgcccagatcgccgaacagttcggcaaggacatcaagtcctattgtccggacgtgaagcacgtcgtggtggtcttcaatccggccgacatcacgggactgatcacgctgatctatgcggggctgaagccttcgcaggtttcgaccctcgcggcgctggactccacgcgcctgcgttcggaactggccaaatatttcaaaatctcgcccgacgaaatccgcaactgccgcacctacggcggccacggcgagcagatggcggtcttcgcctcgacgacgctcgtcgccggacggcccctttcggagctgatcggcaaagaaatgcccgagggcgactgggccgacctgcaacagcgggtgattcagggcggcaagcacatcatcgacctgcgcggccgttcgtcgttccagagtccggcctatatctcgatctcgatgatcgcggcggcgatgggcggcaagccgttcacctatcccgccggcgtattcgtccacaacgacgagttcaagcacatcctcatggcgatggagaccgtcatcacgaaggagggcgtgtcgtataagaacgtgcagggcacggccggggagcgccaaaaactgacggagagttacgaacacctctgcaaactgcgcgacgaggtgatcgcgatgggcattctgcctcccgtcggcgagtggggccgcctgaatccgcacctgaaatagcgggcaatgcaaaactgaaaaggaccggatgcatccggcccttttttaattggacgagcggaagtccacgggaattgtgatttccacggggacctttcgtccgtacagctctcccggcttccagtgcggggagctttcaagcgcccggaccgcttcggcggataacttgctgtcgggcgattgcaggacacgaatgccggtcagccgccccgtcgtgccgatcacgaacgaaaccaccacgcggggtggaaagggtgggcagccgatgacgatccggacattccggacctgttcgttcacccactcgcggaatgttcggatgtcgccttcccggaacaggggcggcgtgtcgcaatgtatgagaacgagcgaatcgcgaaatacgacgatccgggccgccggctgtttttccgccggctgtgccgctgccgaatctgccgccaccggctgctttgccgcggtaggtttttgtccgaaagccgccgccggggcggtgagcaggacgcaggcgccgatcagaccccggaacgtcatggcctggcctggaacacggcgcgcagttcgccgtcgctcaacagcagcagcatcgggccgtccatgtcgtaatgggtcaccgattcgagcattttggtgaaggcttcctcctcgtccatgcccgggcaggccatcatcgtcgcggccagaggcccgatcttcagcgtgcgtttcccatcggtcttgtaggcgcccgtcaggcggttgcaggccccgacgcccgtcaggcggttgccttcggcgagcagcgtgacggtgaatttgccctcctcgggtttgaccgccttgccgccgagctggatcagctgccactcggtgcccgccagcgggcggcgggtctttttctggtaggagcggcagttgcagcatccggccataaaggccgcagcgacagcgactatcgcaattttcagtaaaatcttcatcgtttttccatttggatcatatggcaaatatagggaattaattatacctttgtacaacttccggacccgatatttccgccgcaggcggatataagtccccgcttcggcgtggattcaagggagggtcgggcctgtacatgcggccagaggctgcgagtacggcggttgaaagcacgaaggcttaaataatttcaagataattttttatgaaaaccatcatcgcttctccccatgcgcccaaggccgtgggtccctattcgcaggccgtcgaggccggcggcgcgctctatgtttcgggacagctcccgatcgacgccgcgtccggaaagatggacgaaggcatcgaggcccagacgcgccggtcgctcacgaacctcggccatattctgcgcgaagccggatacgattattccgacgtggtgaaaaccacggtcctgttgcagtcgatcggcgatttcgccgccatgaatgccgtctatgcggagttcttcacctcggagatgccggcgcgcatgtgctaccaggtcgcggcgctgccgatgggcgcgctggtcgaaatcgacgccgtggcggtgaaataatcccgccttcggaccgaaggcgcgctccgggtatctggggcgtgccttttgctcttttgtagatattttgtgaataagtttggctcttcatgctggctttttatccggaaaagccgcaattttgtagaaccgggttttgcccgccgtgacgcctgaaatctgaaaatatagaaataatagtctgaaaatagttatgtcaaaagccaccaaagccgacacgccgcagaaggtcaattacaacgatgcggttgccgagtcgaagaagtatttcgacggggacgacctcgccgccacggtgtgggtcagcaagtacgccctcaaggactctttcggaaacatctacgagaaatcgccgcgcgagatgcacgagcgcatcgcttccgaaatcgaacgcatcgagcaaaaatacccgaacccgctcccgaaggaggaggttttcgcgttgctcgaccatttccgttacgtcattccgcagggcggcccgatgaccggcatcggcaacaatttccaggtggcgtcgctgtcgaactgcttcgtcatcggccataagaaccccgccgactcctacggcggcatcttccgcatggacgaggagcaggtccagctgatgaaacgccgcggcggcgtgggccacgacctttcgcacatccgccccacgggcagcccggtgctcaactcggcactcacgtcgacgggcatcgtgcccttcatggagcgttactcgaactcgacgcgcgaggtggcgcaggacgggcggcgcggcgcgctgatgctgtcgctgtcgatcaagcaccccgacgccgagcggttcatcgacgccaaggtcgacacgggcaaggtgacgggtgccaacgtctcgatcaagatcgacgacgatttcatgcgtgcggccctcgccgggaagaaataccaccagcagttcccgatcaagtcggacaaccccaaatacgagcaggacatcgacgcccggaaactctgggagaagatcatccacaacgcgtggaagtctgccgaaccgggcgtgctgttctgggatacgatcatccgcgaaagcattcccgactgctatgccgacgagggtttcgtgacggtttcgaccaacccctgcggcgagatcccgctctgcccctacgattcgtgccgcctgctggcgatgaacctgttgagctatgtggacaacccgttcaaggccgatgcgaagttcaatttcgacaagttcagggaccacgtatacaaggcgatgcacatgatggacgacatcatcgacctcgaactggaaaaggtcgaacagatcatcgggaagatcgccgccgaccccgaagacctggatgtgcgccgcgtggagctggagctttggaagaagatccgcgaaatggcgcggaagggccgccgtacgggtctgggcatcacggccgagggcgacatgctcgccgcgctgggtctgcgctacggcacgcaggaggcgatcgacttcgccgtcgaggtgcagaagtgcctcgctctggcggcttacggcgcttcggtgaagatggccgccgagcgcggcgccttcccggtttacgacgccgcgaaggaggtgaacaacccgatgatcgcccgtatccgcgaggccgatccggcgctctacgaggagatgacgaaggtgggccgccgcaatatcgccatgctgaccatcgcgcccacgggaaccacgtcgctcatgtcgcagaccacttcgggcatcgagccggtgttccgcaccgtctacaagcgccgccgcaagatcaatccttcggacgtggacacccacgtcgattacgaggacgaaacgggcgaaaagttccaggagtacaacgtttaccatcataatttcgtcaaatggctggaagccagcggatacgacacgtcgaagctggcgacgatctccgacgccgaactgaacgagtgggtcgccgcgtcgccctaccacggcgccacggccaacgacatcgactgggtggccaaggtcaagatgcagggcgccatccagaaatgggtggaccattcgatctcggtgacggtgaacctgccgaacaacgtctcggaggcgttggtggccgatgtttaccgcacggcttgggagtgcggctgcaagggcgtcacggtctaccgcgacggctgccgcgacggcgtgctgctggagaagaactccaagagccggaagaagtgcgaggagcatcccggcgaggtgcagaagcgtcccaagtcgattcctgccgacatcgtgcggttcaagaacggcacggaggactggatcgccttcgtgggcttgcagggcgggcgtccctacgaggtcttcacgggtaagatcgaggaggacgccatgttcattcccccgaagatcaagaagggcttcatcatcaaggtccgcgaggcggacggtacgaaacgctatgatttccagtacaccgaccgttacggttatacgaacaccatcggcggcatttcgcgtctgttcaacgaagagttctggaactacgccaagctcatttcgggcgtgctgcgtcacggcatgccgatcgagaagaccgtgtcgctgatcgagtccctgcatctggacagcgagtcgatcaacacgtggaagaccggcgtgtgccgtgcattgaaacagtatatcgtcgacggcacgaaatccaagggtaaatgcccgagctgcggacaggagaatatggcctatcagaacggctgtctgacctgcatgtcgtgcggctattccaagtgcggctgatgtttgtttccacctgatttgtgttctaaaaagccccaatgcccaggcatttggggctttttacattttgaagccctctttttttctgtttttttgaccggatttgaatggtttttgtgaaaaaattgtgtacttttacgacaagtatgtaagacgtattaaagatgaatattatgagaaagattttcttgacttttttgctcgtggctttcgcctctgccgcatttgccgaaggaacgccgaagaagccgagcgttgccggattcgtgtcgaacggattctgggataattgggagatttcggccggtttcggaaccggcacagccttctccaacggcggtaactccggctcttggggcgaccgtttcggtttcgagggcaacctgtcggtgacgaagtgggtgcatccggtcttcggtatgcgcgctcaattgcagggcggatggttcaacaatttcgattcccagatcggcaagatgacgtggccgtacatgttcggacacatggatttcatggttaacgcctcgaactggatcggcggttaccgtgccgaccgtgtgtggtatgccgtgccgttcgccggtttcggttacatggcttcgaacttcacggaccgtagccagcgtgagaatgcatccggttcgcgtcaggacttcgccttcacggcgggtctgctcagcaagttccgcctgtcgcccgcattcgatttcaatatcgaactcaaggggttgctcgccaagtcggatatttgccctgcggagatgaacggttcttatctggccggactttccgctacggctggtatcacctaccgcttcaaccagcgtggctgggagcgcggcgttccgggctatacggccgatgacatccgtgctttccagaatgcagtggctgcgggcaattccgccctcgaagccgcccggtcggagaatgcggatctggccaacagactgaaggctgccgaggccgaggccgacgccgctaaagccgctgccgccgctgctgctgccaaagccgccgccgaggccgctgccgcacagaaggtgaacaccctcagcccgacttcgatcattttctacgattacagcatgtcgaagctgacgccgaaggagaagacccgcctcgaactgatggccgacctgatcaagagcggtccgaaagaccgggtctacaagatcgagggccacgccgaccagcagacgggtacggcggcaggcaacaagcgcgttgccgagaaccgcgccaagagcgtttacgacttcctcgtaaaatgcggcgtgaaccccaaacagctgacctacgaaggcaagggcaacgcagccaatgtttacgagaacaaccagaaggccaaccgcgccgtgatcatcaaataaggccgggccgtattggggagggcgaatggaaccttcccgccatagagaaaaagatgctccgtttgcgggagcatcttttttcatatatatattatataaggtatgcttttttgccgaacccggacttaccggatgatgacggcgttgacgagccgtacgcccgaacggcggtttatctcctccttgagcgcctcgcgctggtagaaaagttccgagcgcaggacgctcgactgtatgcgtacgtacaggatgtgcttttcgagccgcaattcggtggtgacatccgcggcgcggtcgccgacaatctcgcgccatgtgtccggcagtttgccttcggcgactttctcggcgatgtaggggcgtttgaaaaactcctccagcaggtcgcccatcagcatggttttggttcgtctcatggctgttcgtcggttgattcgggttgtacggatcgctctttttccgcgcctttcgcggaatcttccgttgcattttccgaggcgttctccggggtgtttgcggcgttttcagctgcattcccggccgggccttccgccggatcttccgccgcggcccgctcctgcgtcacggcgccttcggcgactgaaaagagcgtgtagtcgccgcccgccttgtcgagaatccgtttcaggcgtgtcgggttgcagtcggtgatcaggatttgcccgaaggtgtcgtccgagaccagccggatcaactgttcgacccgcccggcgtcgagcttgtcgaacaggtcgtccagcagcaggatcgggcgttcgcccttcgtctgggcgacgacggcgtactgcgccagtttgagggcgatcaggaaggatttctgctgtccctgcgatccgtatttgcgcaggggataacctccgattttcagcaccaggtcgtcgcggtgaatgcctgccgtcgtgaattcgttgacgatgtccttctgccgcgcatcgagcagtatctcctcgaacggacggtcgttcagctccgatttgtagtgcagttcgacctgctcccggtcgcccgagaggatgctgtaataggccgcggtcacgggttgcagccgctcggcgaactcctgccgccgggcgtggatggccttgccgtgttcgcacagctgcatgtcgtagatttggagcatggtttcgtcgggccgggttttcagcaggcggttgcgttcggccagcacggcgttgtagcgcatcaccgaaccgagataggcgcggtccagctgtgaaatgaaggcgttgagatagcgtcggcgctcgtcggcggcgtccgagatcagcgcgctgtcggccggcgacacgatcaccgcgggaatcagtcccacgtggtccgaaagccgttcgtactccttgccgttgcgcttgagcaccttgccgcccttgcgcgagaagctgcacacgatggtttcccgcttgccggcatcgctcgcataggtcccttcgacgaggaagaagtcggcgccgtggcggatgctctgcccgtcggtcatcggcagcgacgacttgcacatcgagaggtagtaaacggcgtccacgacgttggttttgcccgcgccgttgtcgcccaccaggcagttgatgccggggcacagcgcgagttcctcctgggagatgtttttgaaattcagcagcgctattttcttcagatgcataggacaaaaatacaaaaaatccggacacgacattgcacattgtgaatagttttgtatctttgcaaactatcgtacgaattataaactaataacacaataagcaatatggcaaagcagaacgtcgccgagcaggaaaccctcggcgaagcaatgaacaaaacggagttgtttttcgagaggaacggccggacgatgtcctacgttttcctcggtctgctcgtcctcgcagccctcgttttcggctaccgctcgctgatcctccagccccgcgccacgaaggccgccgagatgatcgccgaggcgcagaaccgtttcgaaggcgagaaccccgatttcgagacggcgctgctgggcgacgacaacgcggccggtttcctcgacgtgatcgagaagtatggctcgacgccttcgggcaacctcgccaagcattatgcgggcatctgctacctgcgtacgggcgatctggagaacgccgccaaatacctggcgaagttctcgcagctgaaaggtatccccggggagctgatcaacgcacagaactacggtttgcagggcgatatcgccgttgagcagcaggactacgccagggcggtgaagttctacgagaaggccgtgaaggccgccgacaacaacctgacggccccgatgtacctgcgcaaggcaggtcttgcggagcaggcgcagggcaatgagcagaaagccgcggctttctatgaagagattttgacttcgtatcccgcctcgatggaggcccgcgatgcggaaaagctgctcggcagcatcaaatagcgaaagacgatggcgaccaagaatcacaacctttccaaattcgactcacccctgccttcggccgctgacatgcggttcggtatcgtcgtggccgagtggaaccgcgaggtcaccgaggccctgttggagggagccgtgcgcacgctgcgtgccgccgggtgccccgatatgaatatccaggtcaaatatgtcccgggcacgttcgagctttcgctcggcgcgcagttcttcgcggagtataccgacgtggacgccgtcatcgctctcggatgcgttatccagggcgacacgcgccacttcgatttcatctgtcagggcgtgacgcagggcattacgcagctgcaaatccagtggaacatgcccatcgctttcggcgtgctgacggtgggcgacatgcagcaggccctcgaccgctgcggcggccgtcacggcaacaagggcgacgaggctgcggccacggccatcaacatggtgaagttgcagatcgacatggaggcggcttcgcccgaccatgaacccgaccggcgcaatatcaactgattgccgctttctggcggcgatctttcgcacatcctttaaacgaggcggatggacagtaccgaagtacattccatccgcctcgttcttttgctgtccggcgttcgttcgtctgatccgttcccgccgttcgcccggacttgttcagctgtcgccgcttcggccggtcattgggccttttcgagcgtgatgcgctccgaatagcggcgtccgaaacggtccgtggcgactacctcgatcgtctgtgccgaagccgaaggacgcgctttgaaatagaagtccgagatgcggggatgctgcgatttggcgagtttccgcccggcgtttttcagagagtcgagatgcgccgcatagtcggggtcgacgatctggatgcgctgcattgcgccgcggtagcggccgtcctcgtaccagacgacggtccagcaggggtcccagttccagattttggccacgacgcttccgggaaacgcttccacctgcccgggctgccatacccgcagttgccgtacggccggagacccgaggctccggtactcccacgagaactctccgccgcactcgcggaagagctggtagcctttgggcgtgccgtccttgttgatcgggtcgtaccacagatttccgcagatctgtgccacgttgtgctccacgactccttcgcggatgtcgtagttcgagttgacgtgcgtgtgtcccgtgatgaaatgcagttcgtggccggcaaaggcgtccatcagcctggcggccgactccatgacctgattgcctttccaggccttcatggccggggcgtgcatggccacgcagacgcgcgacccggcgggcagccgccgggcgtattccgcggcccaggccagttgcagcgagtcgatctgctcgtcgtatttcttcgctccgtggtagacgatgtcgtcgaggacgatgtagtgggtccgtcccatgtcgaaggcgtagtaggtggggccgaaatggttccggtagttctccgtggcctcccggtcggtgtatttgttccggtcgtggtcgtggttgccgatcacgccgtagaccggtattccgagcgatgcgaactgctcgcggacgccggcgaacagctccggagagtcccagacgatgtcgccgagcagcagcgccgcctgtgccgtgccccgttgcttcccgagggcggtcgcgcgttgcagttcggggatgatctcggttcggagccggtcgaaatgcgccgcggttttgggctgcgggtcgccgatcgccagcaattcgtaaacctcgcccgtggccggccacggacgcagctcgaaatcgtaacgcttcgtggaagcggcgtagggccggaagaattgcgggatgtcctgctccatgggggccaggtagccggaaggggttacgatgctgatgaacagcgcgtcgtcgtcggcgtcgagggtgaaagttccgtcggcgccgctttcggtgaaggagtggccgtccgtgacggtgacgccggagaccggcgtcccggcgcatttgaccgtgccccggatcgggcgggccgtaacggctgcgccgaggcagcagacgagcagcaggacaatgaatcgtttcatggtttcggtaggttttgggtttcgttctgatcggtgcgggccgctaaaagaggcccaggttatccaggaagatcagcagcagcactgccgggcagacgtagcgcacgaggaagatgaacaccccgtagatacggaatttcagcgtgccgttgttgctgatttcggccttgagtattttccggtcgaggcgccagccgacgaatatgcaggtgaaaaatccgccggcggggagcaggatgttggccgtaaggtagtcgagcgagtcgaaaatcgtgagtccgaagatgttccatcccttcagaacgcccagcgacagcgatgccacggcggccagcgccatgcaggctccggtcgtggaccatgcggcggcccgccggctcatgtgccactcctcgtgcatgtaggccgtgatgacttcgtgcagggagatggtcgaggtgagcgccgcaacgaccagcagcagaaagaataccgacgaccagaccatgctcagcggcatcgagttgaagatgcccggcagggtgatgaatacgagcgacggtcccgacgagggttcgatgcccacgctgaacaccgccgggaagatcaccacgccggccagcacggctaccagtgtgtcgaggatcgtgacgttgagcgccgtgtggcgcaggttggtgtcgggtttgaagtaggaggcgtaggtgaccatcgtgccgatgccgatcgagagcgagaagaaggcctgccccagcgccacgagcaccgtcgagggcgtcaccttcgagaagtcgggccggaacaggaaccgaagcccttcctcgccgccgggcatcagcagcgagtggatcgacagtgcgatcaggatgacgaacagcaggggcatcagcacctttgccgagcgttcgatgcctttctgcacgcccgtcgcgatgacgaagtgcgtggccagcacgaacagcgcggtgtagagcacgggccgccacgggttctggatgaaattctcgaaaacgctcttgtattcgtcggcggtggtgtaccgggcgaggcttcccgtcacggagtgaaccatgtattcggcggtccatcccgacaccacgaagtagaagcccaggatcaggaatgccgccacgacgccgttgtagcccaggaaactccacttggggtcgagcgcccggtaggctcccacggcattgcggtgcgaggcgcgtccgaccgagaattcggccaccatgatgggcagtcccagcagcaggacgcagagaatgtaaattaccagaaaagctccgccgccgttgtctccggcgacataggggaaccgccagatatttcccagccccacggaacttccggccgcgacgagcacggcgctcaatttgccgcccagcgttgcgcggccgtgtgaatgatgcatatatcggttctatttgaaaaactgcgcgcacgcagccgcgtgcgcgcagttttctatttctccagtacgacgctcaccttctccagtttgccgccgagcgggggcgccagtttcgagacggtgcattttacgtgccggacctgccggaacgaggcgtagaccgcctcgatgatgttcatcgccacgcgctcgatcgtgcgctgggtaatgcgcatctggagcgagacgacttcgtagaccgtgaggtagttgaccgtctgttcgacgctgtcctcggcggccgcgtcgcccaggcaggccgtgatctccaggtcgaccgtgaagcggttgccgaccttccgttcgagttcgtagcagccgtgcagcgcccggaactccatgcgctggagaacgatccggtattccatcctattcggcgatcacgaggtagtagttcttcttgccgcgctgcacgagcaggtatttgcccgcgatcaggtccgcgtcggtcaccgggcgcatcgcgtcggccagcttctccttgttgagcgacacgccgccgccctgcaccagtttgcggcactcgcctttcgaggcgaagatgtcgcttttctcggcgcagaggtccacgaacgggatgccggccgcgagttccgtgcgggccacgcggtactggggcacgccttcgaacacttgcagcaaggtctgctcgtcgagacggtgcagagcctccgacgtggcgccgccgaagaggatggccgaggcctcgacggccttttcgtactcttcgcgcgagtggatcatgcaggtgatctcctcggccagccgtttctgcaatacgcgcaggtggggagccgcgtcgtgctcggcgatgagtgcgtcgatggtctcacggtcgagcagcgtgaagatcttgatgtagcgtttggcgtcctcgtcgctgacgttgagccagaactggtagaacttgtagggcgatgtgtagcgcgggtcgagccatacgttgccgctctcggtcttgccgaatttcgtgccgtcggccttggtgatcagcgggcaggtgatgccgaaggcctcggcctctgcgcccagcttgcggcggatcagctccgtgccggtggtgatgttgccccactggtcggcgccgcccagctggattttgcagttcatcgtctcgtagaggtgcaggaagtcgtagccttgaaccagctggtaggtgaattcggtgaacgacatgccgtcgccctcgccgttgaagcgtttcttcacggagtctttggccatcatgtagttgacggtgatgcacttgccgatgtcgcggatgaaatcgaggaacgtgaattccttcatccagtcgtagttgttgaccagcgcggcggcgttcggggcgtcggagtcgaagtcgagcagtttggccagctggcgtttgatcgcctcctgattgtgacgcagggtcttttcgtcgagcaggttgcgctcctgcgatttgcccgaggggtcgccgatcatgcccgtcgcaccgcccacgagggccagcggacggtggccgcacatctggaagtgcttgaggatcatcacgcccaccaggtggccgatatgcagcgagtcggccgtggggtcgatgcccaggtaagccgtcgtctgttctttttcgagttgttcctttgctccgggcatgatcgtgtggatcatgccgcgccattcgagttcttcgatgaaattctttgttgccattattgcgttatttaattttcactttgtttttcggtggaagcgcagttcggaatctgcttccgtctgacgctccatcgcccataaatcccgctttttaagcgggttactccacttccaaatccaatgctttgcggagttccgcgatcagcggattcttttctgtcatgtatttcacccggtcttcgagtttgatcgggcgtgcggcccgaatttcctcgttgacgaccacttccagttcgatcgctcccgtgatgcccgccagttcggcgatgcgcatcagcatccctgtcttgctgcggagtatctcttcgcgcagttcgctcgtcggcacgctcagcgagatcgtgttgccctgcaccctcatcagttcgaaggccgggacgaaccgcggacgtcgttcccggatgaggttcaggatcttttcccgggcgcgttccagtttccgttcgcactcggggtcgatcgtcgcgacctccggttcggccgtttcctgctcggaaggctcctcgtccggattgctgcccgccgaggcgagcagttccgaaagggaggttcccgagatcagcggcctccgcacgggctggggcgcgggtttggacgcttcgggccgtgcggccggagcgggagcgggtcccggggcggctgcggattgcgccggcgtttccggccggggtgcggccggctgcggagccggggcgggaatcggcgcggacgccggttgtgaggcctgcccgggttgaaccgctgcggattgctgcggagccgccggaacgggattcggaccggggcgggtcgccgggtcgggctgcggttgcgccgcaggcgtcgccgcgacggccgcggccgccgttcggggtgtcagttcgggaagcggatactccccggaagatgtcagggtgtcattttttttttgaccgagtccggcgattttcatcaggcccaactcgacaagcaatcgctggttcgacgattgccggatcttcccgtcaagttccgtcagtacggagatggctccgaacaggaactcgacactgcaggcgcccgcctgcgtccggtatcgttcgagcagcgttccggtcatttcgatcagtcgcagcgtgtcgggctgcctggccatcaggagatccctcatatggcggttcatgccggacatgaaggtctggcccgagaagcctttcgacagcacgctgtcgaaggccaccagcacgtcgacgtagttgcccgcgagcagcatctccgtcacgctgaaataggtgtcgtagtccagcacgttcagcgtctgggccacgttgcggtagtccagcgccgtgccgcagaacgacacggccttgtcgaacatcgacagcgcgtcgcgcatgccgccgtcggccttctgcgcgatgaggttcagcgactcttcgtccgccgagatgccctcctgggaggcgatgtatttgaggtattcgaccgaatcttcgacgcggatgcggttgaaatcgtagatctggcagcgcgagaggatcgtggggatgatcttgtgtttctcggtggtcgccagaatgaagatggcgtgggcgggcggctcctccagcgtcttgaggaaggcgttgaaggctgcggccgagagcatgtggacctcgtcgatgatgaacaccgagtaacggcccacctgcgggatgatgcgcacctgttcgatcagcgtgcggatgtcctccacggagttgttcgacgcggcgtccagctcgtggatgttgagcgaacgtccctcgttgaacgagcggcacgattcgcactcgttgcacgcttcggcgccgtcgggtgcgaggcagttgatggccttggcgaagatgcgggcgcaggtggtcttgcctacgccgcggggaccgcagaagaggtaggcgtgggccagctggccgcgctcgatggcgttctggagcgtcgaggtgatatgtttctgcccgacgaccgaccggaaggtcgcagggcggtatttgcgtgcgctgacgatgaaatcactcatagtgttgcaaagatacgaaatatgaattaagaattaaaaattaagaattaaaaattatgtgccgtgctccggcacgacaaattggcggttgttggcagttgttctgtgacaaataatgacactatgtcctggattcggagttggcaggggttttgctcaattcacaattcagaattcaaaattaaaaattacatattatgaacatcaacactcttaccatcaaggcgcaggaggcgctgcaagcggcgctctcgctggcgcgggagcggggacagcaggctgtcgaaccgctccacctgctcgcggtgctgatccgcgaggacgattcgctctcgacgttcctgctggggcgcgtgggagtgaatgtacgttcgctgcgcgacgaggtcggccgggccgtggcgtcgctgccgcgcgtcgagggcggcggcgagcagttctttgcgcaggacacctcgaaggcgatccagcgcgccgtggacttcacgaagaatttcggcgacaaatacgcctccgtcgaacacctgctgctggccctcgtggccgagcgcgggcaggccgccgacatcctcaaacgcagcggcgcgacggaaaaggagctgatcgaggcgatccgcaccttccgcaagggtgcgacggtcgattcgcagacctccgagcagcagttcgacgcgctgggcaagtatgccatcaacctcaacgagcaggcgcgctcgggaaaactcgacccggtcatcgggcgtgacgaggagatccgccgcgtgctgcaaatcctttcgcggcgcacgaagaacaacccgattctcgtgggcgaggccggcgtcggcaaaaccgccatcgccgagggcattgcccgcaggatcatcgacggcgacgtgcccgagaacctgaaatcgaaggtcatctactcgctggacatgggtgcgctgatcgcaggcgccaagtaccagggtgagttcgaggagcgtctgaaagccgtcgtgcaggaggttacggccagcgagggcgagatactgctcttcatcgacgagatccacacgctggtcggcgccggcaagtcgtcgggggcgatggatgccgcgaacatcctcaaaccggcccttgcgcggggcgagctgcggaccatcggagccacgacgctcgacgagttccagaaatacttcgagcaggacaaggccctcgaacgccgtttccagaaggtgatggtcgacgagccttcgcaggaggacgccatctcgatcctccgcggcctgaaggagcgttacgaaaaccaccaccaggtgcggatcaaggacgaggccatcgtggccgccgtcgagctttcgacgcgctacatcacctcgcggttcctgcccgacaaggccatcgacctggtggacgaggccgcctcgcggctgcgtctggagatgaactccgtgcccgaggagatcgacacgctcgaccgccgggtccgccagctcgaaatcgagcgcgaggccatccgccgcgagaaggacaaggagcgcgtcgagcacctgaccaaggagatcgaggaactgaaggcccgtgacgccgagatgcgtgccaggtggcagggccagcgcgatctgctcaaaaagattcaggccaacaaggataagatcgagtcgctgaaagtcgaggcccagcaggccgaacggcagggcgactacggcaaggtggccgaaatccgctacggcaagattcaggaggccgagaaggagatcgccgctttccaggaggagtaccgcctcgcttcggccagcggttcgatgatcaaggaggaggtcgacgcgcaggacgttgccgaggtggtgtcgcgctggacgggcattcccgtgacgcgcatgctggcctcggagcgcgagaaactgctccacatggaggacgaactccacaagcgcgtcatcgggcaggagcaggccatcgcggccatttccgacgccgtgcgccgttcgcgcgccgggctgaacgatccccgcaagccgatcggttcgttcatcttcctcggtacgacgggcgtcggcaagaccgagctggccaaggcgctggccgagttcctgttcaacgacgaccagatgatgacgcgtatcgacatgagcgagtaccaggagcggcacgccgtgtcgcggctcgtcggggcgcctccgggatacgtcggttacgacgagggcggccaattgaccgaggccgtgcggcgcaagccctattccgtggtgctgctcgacgagatcgagaaggcgcatcccgacgtcttcaacatcctgttgcaggtgctcgacgacggccggctgaccgacaacaagggccgtacggtggatttccgcaacacgatcatcattatgacctcgaacatgggttcgcaggtgatccaggataacttcgccgaggccttcgacggcaggaagctgcccgaagaggttgtcgagcggacgcgcctcgcggtgatcgacctgctgaaacagcagctcaaaccggagttcctgaaccgtatcgacgagatcgtgatgttcgagccgctgacgcacaaggacatcgaacgcatcgtcgacatccagttgggcatcgtgcgcaggatgctttcggagaacggcatccggctggagtacagcgacaaggcgcgcgaatggatcgcctcggcgggttacgatccgctctatggcgcacgtcccgtgaagcgggtcatccagcgctatgtggtcaacgacctttcgaagcggattcttgccggcgaggtcgaccgctcgaagccgatcgcgattgacgccgggcaggacgggctgacgttctcgaactgacgccgcccggcagagtgaaaaagggttccgatgattcggaaccctttttcgtttaccggacgtatctgctgaaaaacttccacagctcttcgcccgtgtctacgcccgtctctttccaggagtgctttccgccgacggtctcgtagagccagacctcgtttccgtccgtgccctccgtgtagcggtgggcgatgacctgcaagccgccggggcgggagggcagggtgtcgatccgctctgcgaggcatttgttcttggcggcccagtagccgaccgcggtcgggacggagacataggcgccccagcccccttcgttgccgaggtcgccttcccagcgggtcgtccggtcttcggtgccgtggatttcgaacagcggaatcggatgcggattgcggtccgaacggaggatttcgacggacatgaacccggcgaccggtccgagggccgcataggtctccggacagcgcgaggccagcaggtaacacatgtccccgccgttcgacatacccgtgcagaagacgttgcggcggctcaaaccatgttttttctgaaggtgccggatcagttcggagaggaaccgcacgtcgtcgacggccatatcggcctgaaaggggtaacccacgttccagcatgttttgccgcggccgtcgcgttcgccctgcgggtagcagacggcgaaaccgtggcggtcggcaacgcggttcatgtcgaaccgttccgggtcgccctgtcctccgtagccgtggaggacaatgaccagcggcgcgccgtcgggcagcccttcgggcaggtggaggcggtaggtgcggtcgatgccgcccgaacgcagcgtgtggccgggcgtctgcgcgaggcaggtttccgctgcgaaaagcagcaggcaggaaagggtgtgcaggaggtatttcatcattttgagtattagagtcctttgcgggcgaggcgccaggccagcgcgttgtaaagccggatcacgggaccgcgccagccggcgggcagggcgttcagggcgcggaccttgcgcagcgtgcggcggtaggttcgcgtccaagcgaagaaccgggcggcgcgggcggcctccttcgtgccgcctttggcgctgatgataagcgcttttcccagtgcggcgcgggccacgaactcccggtcctcctcgggggccagcgggtcgtacagctcctcgaacgaatggacggtcttctcgggcgtgtagcttgccgccgagcggttcgaagccacccgcgagtagcggaccagccgttcgggcgagaagcagacttcgtagcggcgggcaatcctaatccacatgtagaggtcttcggcgatcttcatgccctcgggaaacagccccacggtgtcgaacacgcgccgcgggatgcagctggccgacgggatggcgatgtagcggtgggccgattcgcggaagaaattcgccacgacgccccgctcggagggtgtcggggccggataggtcccgtcgtggcttattattgaaaacgccgtgcagtagagtccgcagccggggaactcgcggatcatggcggcgatttcggccagaaaccccggctcccaggcgtcgtcggcgtccagcagggcgatgtattcgcccgtcgactctgcgatgccgcggttgcgcgcggcgcagaccccggcgttggactgccggacgagccttacgagcggcgagccgatcgcacgcacgatctccgcgccgccgtcggtcgaaccgtcgtccacgacgatgatctcctgcggggggcgggtctgcgccagggccgagcgtacggccgcgccgatttccagctgcttgttgtagaggggtatgacgaccgaaatggtgggttctgacatctgttctgccgggttttgttgcgaagatattgatcttttgctacttttgcaaataaaaccgtaccatgaccgtattcgaaaaaaccgaccgattcctgcgcaacctctatgagacggcgttttactttgcagtgatggccgtgaaggagaatttccgcaactacgtcggccgagccggaacggtcggcgcgccgaagccgtcggtcctgatcctcggcaacggcccttcgctggccgaagacctgccgcggctgatcgcccggggcgaacacacggcaaaggacgtcatggcggtcaactactttgcgctggacgaacgttttacgacggtccggccggcttattacgtgctttccgatccgatgtttttccgcgacagcgtctgccgcgaccgcgtggcggaactctaccgcacgcttgccgaaaaggtgacgtggccgatgaacctctacgtgcagtactacaaccccgagcggttcgactaccgtgccgcgctgcccaaccccaatatccgcatcgtgcggttccacacgcaggtctaccgcgggttccggggcgtggagttctggctctaccgccacggtctgggaagcgccaacttcgggactgtggtgcaggtgtgcgagtacgtcgccctgctgctgggttacaagacgctggaactctatggggtggatcatacgctgctcgacggactgtctgtcgacgacgagaaccgtctctgccgggccgacaggcactattacgacgacgctccggccgttccgaagccgatcttccagaaggttccgcaccgtccctatacgatggccgtttatctggccgaggtcgccgaactgttccgcggccacgaggcgctgcgcgattacgcccgatcgctcggggcgcggatcataaaccggaccgaggggtcgatgatcgacgcctacgagcgggaacgaaaatagaaaaagggcggttttgaaaattcgcagggtcggaagactcatttttcagcaattcggctctgttttcaggcagctgctcgcggtggcctgctatggagcgtgcggaatagcaggcttccgcaaggcggagctgcggcctgccgattcgcctccggcaaatcgaaaatcttccgagcctgcgagttcgcaggatcggcttttatttatcccggcaggttccggctcgccgcgatgatttcggccatggcgaagtcctcggggtagtcgatgtccaaaccctcgatgcggtccacgacggccatgtagggacgatcgccgatgcggcggccgcggccgcaccacaactcccgcgaaaagatgaagaaggcgctggtctcgatgtaaaccggctcgatggtctgcgtgcgggggatgttgtcgagagcgtagttgagcggacggccttcgaaccaggcgaaagtctggactttttcggcgctgaacgccgagtcgtattcgcccgaacgcactttgccgagcgcatcggcaagggtcgcggcgcggatgaacggcgaggtggcgtgggcgaggatgtagaggtcggccccgacccgggcggtgaagctgtcgtaaatctcccgtccgagcgtcgtgtcgctgtcgagcgacgggtcgcggagcagcagccggaccccctcgggcagcagcgcgcggatgccttcgtcgctgcaaaagacgtagacctcgtcgatgccctccacttcagtcagggttttcaggatatgacacatcagcggcgatccgtccagcgggcggaggttcttgcctgcgacgcgctggctgttgagccggatgggaacgaatgctacggttttcatggagtctgataatttgtaaaggggttcgtcgcgacacgctgccgcttgcggcgttcaacttcccgccccgggcgggtagtcaggggtggggcggatttgcaaacacggcggaacgccgtggaaacggcattctgcgctgcgatgcattgccgatatttcaaccggcatttcattgtaccagaagattgcagccccggatgtccgaatggtcgatacggccttcgatgacgaacgcgccgtccgcgccgacgcgccccacgtcctgtgtctggataaaggcgcacgaccaccaggaagccaggtccgcgatgttcagcccgccgcgtgcgcctgccgggagcgggtcgaacgggtcgttgacgtcgcgtgccgtgacgcgcatccagcccgggcagcggaacacgttgcctccctgcgaataggcctgcgaggtgagttcggccatgccgtattccgaatgaatctccccgaccccgaaggcgtcgcagaggattcggtggaactcctctttgggaatctcctcgcggtaacccttcatgccgcccgtctccatcaccaccgtatcgcggagcttcggagcgtaccgctccgcgaggtcccacagcgcatagcttacgcccagcaggattttcggcttcgggtcgcgctccatcgccgccagcagtccttcgcagtcatccagatagaatccgcccgatccgcagtcggcgatcagccggtcggccatgtagaccagcgacgaacctttgcgccgcaggtaattgggcagcagggcgtagaggctcaatccggcggggtcgccgtagaagttgcggaatgccgtgcggaatgcctgctcgtagagcgccagcgagcgcatcgggtggcgcgagggcgtcattccggtcgtggccgacgaagtgaagaccgcctcgggcggagtctccccgcaatagaccgtatgcgtcttgaacagttcgatgggcaggtacggaatcttttcaggcgtgtcgacatgctccgtccggacgccgatccgggcgaggtattcgcggtagggggcgcattcgcgggcctggcggcggaatatttccagcgccgcggcgtcgaaggccgctccgtccgcaatgcggaatatgtcgtcgggggtgatcattacatgcaaagttaccaaaaaaacggacgattccaaaaccgaatcgtgtccggttcggcaaaaggtttcgacttctgaaaggggcgtaacgcccccaaaggtaatgaaaaaattgaaacgagactcttcccgaagcgtcggttccgtcgcctgtaaacgcaaaaacaacaacccgcggtccggatacatccgccccgcagtcgttgttttcgcatttgtacttttggctcgcaatgtttcggggcgttatttacgtcgcatgtctcgctttggcgagacaagacgcgctccgtgaacagctttcgcggctcggcaaagcaccgcttcgctgtaaacgcaaaaacaacaacccgcggtccggatacatccgccccgcagtcgttgttttcgcatttatgccttcggcattcgctttgccctcgccttgtcgctatttcttgactttgggcgcgagcatcatgttcatcttcttgccgtcgagcttcggcatcatctccaccttggcgaactcttcgaggtccgtggcaaagcgcagcagcaggatttcgccctgctccttgaagacgatcgaacgtccgcggaagaagacgtaggccttgaccttggccccctccttgaggaagttctgcgcgtgcttgagcttgaagttgtagtcgtggtcgtcggtctgcgggccgaagcggatctccttcacgacgactttcgtctggttcgccttcagttccttggccttctttttctgctggtagaggaacttctgataatcggcgatgcggcatacgggcggctcggccttgggcgagatctcgatcaggtcgagttccatctcgtccgccagacgcagtgcgtcgcggatcgacatcacctgcggctggggaatgttgtcccccaccagacgcacctcgggaaccgtgatctgttcgttgatgcggtggggattctccttttcgggcggcctgcgtccgaagcggggattgttgcctgttgccggtcttggtctgttattcccgggggtaaacggcctcggcgggaatggtttcggtgctgcgataatcgttaagtattaaaatggttaattaaattttgttccttgctttcgggcttccgagagtggtaatcctcgcggctgcgccgcgtttgtaaattttacccactcctgaatcctctccctcggaggggactttgtcggaaagccccggttattccatgcttatttcttttcgagcttgttggcctcgatctcctctttgaccagtccggcgatgaagtcgcggaacgcctccagggacatctgtcccttgtcgccttcgccctgcgcacggacggaaaccagcccttcggcctcttccttctcgccgacgatcagcagataagggatgcgtttaagttcgttgtcgcggatcttgcggccgattttctcgttgcggtcgtcgacctcggtgcgcacatcgctgcggttgaggaactccgacactttctgggcatagtcgttgaacttctccgaaatggggagcaccacgacctgctggggcgagagccacagcgggaacttgccgcccgtatgctccaacaatactgccacgaaacgctccatcgagccgaacggcgcgcggtgaatcataatcgggcggtggagacggtcgtcagcgcccttgtacgtgaggtcgaaacgctccgggaggttgtagtccacctggatcgttcccagctgccacttgcggccgatggcgtccttgaccatgaagtcgagcttcgggccgtagaaggccgcttcgcccagctccacgaccgtcgtgaggcctttctccttggcggcctgcatgatggccgactcggccttctcccagttctcgtccgaaccgatgtatttctccttgttgttcgggtcgcgcagcgaaatctgggcggtgtagttgtcgaacttcagcgtcttgaagatatagagcacgatgtcgatcacgcgttcgaactcttccagaagctgatccggacgaacgaacaggtgggcgtcgtcctgcgtgaatccgcgcacgcgcgtcagtccgtgcagctcgcccgactgttcgtagcggtagaccgttccgaactccgccagacgcacgggcagctccttgtacgaacggggtttcgagcggtagatctcgcagtggtgcgggcagttcatcggcttgagcaggtactcctcgccctcgatcggggtgtggatcggctggaacgagtccttgccgtatttggcgtagtggcccgaggtgacataaagctccttgttgccgatgtgcggcgtgatcacctgctggtagccgtactccttctgcacgccccgcaggaactgctccagccggtcgcgcagcgcagctcccttgggcagccacagcggcaggccctggcccacgcgctgcgaaaaagtgaacagttcgaggtccttgcccaacttgcggtggtcgcgtttcttggcctcctccatcatcgcgaggtactcgtcgagcattgatttcttggggaacgagatgccgtagatacgcgtcagcatcttgttcttctcgttgccgcgccagtaggctccggccacggacgtaagtttcagggccttgatatatcccgtattgggaatgtgcgggccgcggcagaggtccgtgaacgcaccgttggtatagaaggagatggtgccgtcttcgaggtccgtgatcagttcgaccttgtactggtcgcccttctcggtgaaggtcttcagcgcttcggccttggggacttcgcggcggaggagcgcttccttgttgcgggacagctccaccatcttgttttcgatcgtcggcaggtcggcctcggtgatgggcgtcggggaatcgacgtcgtagtagaagccgttttcgatggccgggccgatgccgaacttgatgcccgggtagagcgcttcgagagcctcggccagcaggtgcgacgaggtgtgccagaaggcgtgcttgccctcttcgtcgtcccatttgtagaatttgaccgaagcgtcctcttcgatcgggcgcgtcatgtccaccgtcgcgccgtttaccgcggccgcgagcgagtcagcagctaaacgagggctgatgctctctgcgatctgatacgcagtagtccctttggcatattcacgtacggagccgtcgggaaaagtgattttgatcattttgttgtataaattaagttttcggggccttcggcgcttccacaattacgagacggaatacgcctccgggttgcccggtgtttttgttcgggtctttgtcaatcctccttttcggtctgcggcaggtcgcggaccgaaacgtcgcggccgccgcggtcgcgttcggcgcgttgcagcggattgcgcgtccattcggcccatgcgcggcggtgctccgcgatgtcgatggccgcatagatcgcattgcgcatcgactgcgggtcggccttgtccttcccggcgatgtcgaaggccgtgccgtggtcgggcgaggtgcgcacggccgaaagccccgccgtgaagttcaccccgtcgggcgacaggctcttgaacggcgccagcccctggtcgtggtacatggccaggatgccgtcgtacttggcgtatccgcccccggcgaaaagcccgtcggcggcaaaaggcccgaaggccagcacgcctttcgaaaacgcctcgacaatggccgggcggatgatctcctgctcctcgcgtcccagcagtccgccgtcgccggcgtgggggttgagcgccatgacggcgatgcgcggctcgacgatgccgaagtcctcgatgagcgcacggcgcagcgtgccgaggtcgcgcacgatccgctctttggtgatgttgcgggcgatctccgagacggggatgtgcttggtgaccagccccacgcgcagcacgtcgctgcacaggatcatcatggcttcgccttcgagttcggcggccaggtattcggtatgccccgtgtagcggaagtcgtccgcctgcacggtctccttgtcgaagggtgcggtcacgagcgcgtcgaggtgtcccgccttcaggtcgcgcatggccgcgcacagcgcctctacggccgcgcgtccggcttcgggggtcggcttgcccggcgcgatgtcggccgtctccccgcatgccacgaggttcgcctttccgcggcgcgcctcggcggccgacgccacggggttgaaggagaaggcttcgatctccgcgacggtatttcggtaataggccgcggctttgggcgagccgtagacgacgggtgtgaaaagctccgtcatccgcgggtcggcgagcgccttgagaatgatttcccagccgatgccgttcgtgtcgccctgcgtgatgcctattttgaatttgttttccggcataatcaattttatttcaacttacaaagttataaaatattcagaatacacaatgcctcggattcgattaaaatgaatttttaccccgctttgcgccggaagtgcaatttttcactatctttgttacagcagtctgtgaggattgctgacatttttgggataaaaagcgcatcggctttttttcttaccgccgaaaattggacacttttgtgtaacataaggaataagggttgatgctctcgctgttttccagcgtgggcatttgccgcattctacgttacgggtcgtccaatacctcgacggtggagcagcaagtctgcccgcgctttttttccggaccaagcaagtttggagaaatgagaagatgtgagcggaaaatgttgaaatgcaatgctgaacttgtagatatcgtattccgtctgatgttcgaaacgttctgggtggccccttacgacctgcggcgggatttcccggtgctggtcaatttcgaacgtcatgcgcgccatgcgtcggtgctgttgggtaaaatcgacttcgcctcggcctccggggcgcagatatacgaattgggaaagaccgtcgcagcgctcgaccgggccgtccggcagatcgccgaagcgcggctgttttcgcccgtggagtgtgccgaggcgcaggaactggtcggacgcatccggaatgcgctgcctgcggcctgcgccgccgggcttgcggcggctctttcgcacgattcggaatagctgcgggatgccggctccgcccggcccctgcgaccgtaggtcgcagggattctgtcatgcaccctcgccttcgctcgggataaccgcgctccgtgatttcttgggcggctcggcaaaagccggaaaaaccggagccggtttaaaacgcaacggaccccgcctgggaaatgaatttccggcggggcctgatgcgttttagtccttcggactttattttccggcttttgcgctcgcctggcggcgaaattcaccacagacgatgcccgtggccatggcgacgttgagcgattccgaaccccggcggtcggccggccagggcgggatgaagagtttctgcgtgacggtgcgggccacggcgtcggtgattccgcgcccttcgttgcccatcacgacgatgcccgccggcttcagttcggtttcgtagatgttcgctccttccagaaaggttccgcagaccggaagtcccagcgcggcggccttcgaaagcagcgccgcgaggtcggtgtagtggacccttacgcggaggatcgcccccatcgtggcttgtacgaccttggggttgaaacagtcggccgaggcttcggagcagacgatgtccgtgatgccgaaccagtcggccagccggatgatcgtgcccaggtttccggggttctgcacgtcgtcgagcgccagcgtcagccgtccccgcagccgctccggcttcaggtcgcagcgggggatttcgaccagcgccagcgagttgctcggggttttgagcagcgagagccgctccatgtcgcgcggggcgacggtctcgacctcgggcccgttgaaaaccccttccagcgagaatatcctgcgtacggagaggtgcgatgcgcgcagttcgccgatgagtttctccccctcggcgacgaaaagtccgtgctccgtgcggccgcgtttgtcggccagcgcgcggacgagttgtatgtcggcttttgtcatcgttgtttttcgatggtgtaggtggttccttcggtcgccgggtaactctcggcaaagagcgtccgcgcctcctcgaccagcggcgtttcgtccttgtagcgcgacgaatagtggccgatcacgagccgccgggcgcccgctttcagggcggctttcgctgcgtccgtcgtggtcgagtgcccgcggtcgcgggcgctccgctgttcggcggcggcataggtcgcttcgtggtacatcagatcgactccccggcacagtcccgcggccttggccgagtagttcgtgtccgagaggtaggcgtacgagcgcggcgcataggggcggtaggtcaactcggcattgggaatcacctcgcccgtggccagccgtatctcctcgccgcgcttggcggcggtgatctgcgcgatcgaaagcccgtatttggcgatcttgaatttctcgacgttcagcggcggctccttctcgcggaacagaaacccggcgcacggcacgcggtggcgcagcgggacgctccacacctcgagggtacggttttccagcagcagggcgtgcttggtcgtgtcgacctcggtccacgcgacggtgtagggcagctccgtgtcgaagtaccggaggtggcaggccaggatctcgccgaagggcgccggggcgaagacccggagcggggttttgcgtccgtacaacgccagcgtcgagatgagcgggaacagcccgaaaacatggtctccgtggaggtgcgagatgaatacggcccggattttcagcggattgacgccgtagcggaccagctgttgctgcacgccttcgcccgcatccacgaggtaatactgttcgtggacgttgaccgcctgcgccgaagggtggcgggcgacggtcggcttcgcggaggacgagcccagtatggtgaccgagaaactcaattcgtctgtgttttatactttatgaatgtcgccagaagccggttggtcgtgaaaacgctctgggatgtggtggcggttcgggttttgctgccgtcgtcgtttttctcgatcttttcggtcgtcgtgtaggtcggggcggaggtttcgctcacgacgccttcgaagacgatggcgtcggctcctttctcccggccaatctgttcgatgagggcctgcgcctcctccagcgtcttgccgaagggtgtcgccttgatgctgcccatcgtttcgtagtccgagggaacgtccttccagtcgaaataaagttccggcgcggttccggttgtcggataggctttgccgatataagtggtgcggatttcggcgcacgaggcgatgcagcatgccgccgccagcagtaaaaggagcttcttcatggtccgtcttttgccttattgcagcagaaaccgttcgcagtccagggcggcgacacatcccgacgcagccgccgtgatggcctggcggtagtgggggtccttcacgtcgccggcggcgaagacgccttcgaccgaggtcttcgacgttcccggctcgaccttgatgtagccttcggcgtcgagcgccagctgttcggcgaaaagttccgtgttggggtgatggccgatcgccaggaagaatcccgcgatgtcgatcttccgctccgagccgtcgttcctgcgcagcagcgcgcccgttacgcccgagtcgtcgcccagcacctcggcggtgttgtgctcgaacagcacttcgatgttcggcgtgttgaacacccgctgctgcatcgccttcgaggcgcgcaggtggggtttgcgcacgatcaggtagaccttgcggcagagcgatgcgaggtaggtggcctcctcgcaggccgtgtcgccgccgcccaccacggccacgtcctttttgcggtagaaaaatccgtcgcacgtggcgcaggcgctgacgccctgcccgcggaatttggtctcggacgggagaccgaggtatttggccgtggctcccgtggcgatgatcagcgtttcggccttgatctccttctcgccgtcgatcacgacgtggaacggacgcgacgagaggtcggcgcgcgtgacgttgcccgtgcggatgtcggcgccgaaccgctcggcctgcctgcgcatcagccccatcaggtcgggaccgctcacgctgtcgggatgtcccgggaaattctcgacgtcggtggtcgtcgtcagctgtccgcccggttcgatgccttcgtaaagcaccggcttgaggttggcgcgcgaggcgtagatggcggcggtgtaccctgcggggccgctgccgatgatcaggactcttacttgttcttccatggtatcggttgttgtttgcatgtttcaatcattattcgttccaaattccgtcaggcgtcgtcccaggtagtcgaattccgcccagcggccgtctttccgcacccggacgacgctttcggccggcgcgtagtcgacgatctcgtattcgggcgggatgacgtagcgtccctggcggtcgatcagccccatccccgatggggtctcgacctcggcgcgtccttcgcggaaatccccggcccaggtgtactgcggccggattacggggttgttctccgtgtccacgaacccgaatccctcgtcgtcctcgacgcagaccagcccttcgaagacgtggctcgtccagcggtggcccgtcaggcggcggtgcggggtgtagacggcctccgtgtcgccgacgcacatcgggtcggccgtccggcggacctgttcgcgcaggctttcgaaggccgcgccgtctcccgaagggccgaaatgcgcgtcgtggtagcgcagcggcacgaaccgcccgcccgaccagcgcaggtttccggcccggaggttgttgtgcgagaagttcagctcccgcagggccgtttcgagggtgtcgagcgccgcgagcagccgctccgcgggttccgtgtggagcgcttcggcgaacggtttgcccgcgggaaggtgttgtagcgccaggtcgaaacggcgttcgcggcctgccgggtccgtccaccgcagttcgtcccgcaggatgcggtattccgcgagatggtcggtgttgaggcgtccgagctgcgacgccgtgcgctccacggaggccagcgcagcgggcgagagcggcatcgagagcagccattgccggccgcgccacgtgatctcggcctcggcgaagcgcgtcgtgcgcatcagccgcggcagtccgtccgccccgggcgccgcacgggcgtcggcgagcgttttgaacgagaggtcgggcgtcagcagcgcccgggtgaagagttgcagcgtcggtgtcatggctattcggtttttacgctgatggaaccgatgttgagcatggtgatcagctcttcggccgaggcgttgaaactcatgccgcggaacggcggcagggcgccggggcctttggcttcgcggatcgcctcgttgaagacctcgggcatggggctggagcagtcgtagagcacctccgcatagcggttggggtacgaggcctcttcggccgaggggaagaacaccgtgcgcggggtgtcgcccgcggcgatgtggatgttgaccagcagcacgttgccgtcggccgtgcggagcgatttgatctgtccggccacggcgcgcagttcggcgtcgtcgcagtcggtggcctcgccgtcggtgatgttgaagaccatcggcgggaaactttcggcatgggccgggtcggcgcaccatgccgcggcgatgtcgcgcacgcggcgcagggcctcgcacatcggggtctgcccggcggcttctggctccacccatgccgggtagggaatttcgcgcagggagatgctgccgtcgggcagccggtattcgatgacttcggtctttatcggaggctccccggccgccagctccgccacggagatcagctccctgccgcccggcagcagggagtagacctcgtcgtcgcccgagtatccgatcacggcgatgtcgtagtagtccctcacgccgtcgctgcggcgggcgcgttcgatcagttcgaacagcatgccgttcgtgatggtcgccacggcttcggccttggtcatctgccggttgcggaaccggattttttcggccatcgaacccgagccgtcgatcgcgaggatgatggcggtgcgatgggtgcgtgtgatgctctgtgtatacatgttgcgtcgtatgttcttctatttcaggccgcggaccgagtagtagtcttcgcggcgctcctcctcgctcgtgcagtcgagaccgtagctgacggccatgtcgagcgaacagtcgcggtcgcggtcggcgtcggtcgtgcggcgcatcgaggcgtgggcgttgtgccccgcggagatggcctcgtcgatctcgtcgacggtcggcgtgtgcccgagcagggcggcgtaaacctgtttggcccagctgtgggcgtagtcgtcgtagtggacggcgaagacccggaagcggttgtccacggcctcggtcgtggtcagttcgccgcggtccacggctgcgaggatcgcctcggtctcgcggcgcgtgatgtactgcccgcccaggtcgagccactgcccgtcgccgtcgtagcgcgggtccgaccctcctctggagagcattgcgcccaacgccgccacgatggccttgttgtagagcttgagcccccgttgcagggctgccgagcggatcagggtcttgttgtgggtgaacaccggggcgtcggggtcctgctcctggagcgaatggaggatgtccacggcctggagcatggcgcccgtgatatagggattgtattcgtcgaaactgatcacgtcgcgtttgaccgagcggcggtcgcgggcgggccacttctcgatgtcgcgcacggcgccgaaactggtgaggttggcgcccggcatgaggtgcgtgcgcccttccttctcgatcagataggagtaggggaaggccgaggtgtcgtggtggtaggagtggtgtcccatgaccatcgtgaaggcgccctcgagcgcgggcgacatgatgtaggcgctgctggcgaacttgcagccgcgcaggtgcaccgactggtgcacggcgccgctcttgaagaggtggttgctctggttcgagccgctgccggcgttgaagaacgagaacatgccggcgatcagcagcgacgatttgtggtgcgagacggtgtagggacctgcgaagatcgaggcggcctcgccgttttcgcagtgcgagttggcgaagaacagcgactctgcggctgtgaaacccttgtccagccggcagctttcgccgacgaagcagcgttcgacgatcgagccgttgtcgatgaccgacccttcggcggcgatcaggtcgtaggccttgacgtccacgccgacgcgcgcgccgtcgcagagcgtcgcgttttcgaggatcgaggcgccgtcgatttcgactccgttgccgatgcggacctcgcggatgaagcgcgccccgacgatgcggcagtcgcttcccacctcgccgatctccgacgagcgttcctcggcgtaggcgtcgaccattttttcgagtgcggcgatggtctgcgggcggtggcggtaaacggccatgacgtaggcgacctgtgccgacagacggtcgaatatcttcaccgtgcggccgccgcattcgttcatcgtggccacgccgacgccgttgccgaaggccgagtggcggcggcattcgagggctgtgacgccttctacgagcgagccggttccgatgcggtagtttgccacgcgcgagcggacgatgcgggcctccgcggctatttctacatctccttccaggtggctttgcaacagctgaaagggtttgaaatcctccgagaccagcaccttcgaccaatcttcggccgaattgccgagtgcttcgagtgcggcggtctccgcggaggttaattttctgaatggagtcattgattgtggagttatttagatgcaaatataacaaattgcatttaaattgcatgaacccttttggggaactcgtcttttcttccggccgggaccgttccggggcgggtttgcgcgggccgcagcggcgtgcctgcgggggcggattttgcccgaaagcgatttttgatcccgctctttccgctgccctgcctcactggtatcggggcgttttcagcggatgtgcgatctcctgccgttcgccgttgcgcacgacctgcgcctttccgccgcggaacggcttcaccgccgcacagcccgggcagcttaggcgcgtgcggcccgccgtgtcgatgtagtgccacgtgccgccgagctgaacggcggccagcccctcggtgaagtcgaacccgttgtcgtagagcggcgcgacgacgacccgctccgccgtgcggtagccccagcgtccgttttcgacgaagagttcgggcgtttcggcctccgtcccgctccgggcggcgggtttctcccggaccgcttcggcgagcagctccgcaagtccgaagagccgcagggtgggtgccgtgagcagttgcgcgatgcggtactgaacggccatgccgcgtttttcgaacagcgcgagcgtctcccggtaggccgggtcggaggcgatccgctggggcgtgtacagcaatccgtcggagcttccgtaacggtcccagagcgtagggtcctcggccagcgcgtgcagcgccgtcgagatcagcgccgcggggtagtcgtcgatccgttcgtcgaagtcggccgccgtgcgggccgggtgctggtaggccgccgtgcccagttcggggctgatctccccggcgaaggcgggcaggtacgaggcgtcgaagtcgatcgggcagagcgtgccgtcgtcgccgacgatgatattctcgggtttcaggtcgccgtgggcgcggtcgtccgtgaccagcgcgagggccagccggtcgaacagccggacgaggatttgcagactctcgcggtcccggagggcggcggcctgcgccacggtttcgtgcagggtggagccttcgatccagtcgccgaggaccgtatcgacccagacgccggtttcgggcgaggtgtgcaggtaaagctccttttcgagaagccgctggccgtagatctccttcaggtggcgcatcgggcgcaggtaacagcgcagcgagcggatgcgtccgccgaggcggatgcggaatacggcggcggagttgccggcgctgaagcaggggcggccctgttcgtcgcggcacacgtcgatttcacccagcgtgcgcgtcaggccgcgggagtcgagaagagccagcaggtattgacggagggtaaacacgtggcgggaatcggatttttaacgtcgtccgacttgtcggacgacggcgcaagttacgaaaattcgctaaaaaaccggacccgaaggcccggctttttcgttggatggtatctgttcgcccgaaggcgcagcctctctccgaaagcgttccggcttgcggccgccccgaaaacaggcctcttacgcctgcgtctgctaatggcaattgcaatggccgtcgtggtctccgcagccttcgccgcagtcaccgccgcactcgccgcacgaacatccgccttgcaggtcctcgggcgtcacgtcgcgcaccgaaaccacctccacgtcgaagttgagcgtcttgcccgccatcgggtggttgaagtccatcttcacggtcgattcgccgacctccttgacgatgcccatcatgcggttgccctgggcgtcgctcatcggaacctggctgccctcgaagaggatgtcctcggcgagcttgccgtcgaccatgaatatgtctttcggcaggtcgacgatggcgtcggcgatcacttcgccgtagccgtccttggcctcgagcgtgaacgaaaccgattcgccgatctccttgcccaggatcgcctcctcgaatttggggagcagcatgcccgttccgaagatgaattcgagcggctggcccggacgcgactgatccgcgatctgtccgtcgacggtgagcttgtagtctacgccgaccattttgttttgttctactttcatacgattgttataaagtttagttgtttttatcgtcgtttttcagggacgttgcccggcattcacggctcaaaagcgattttccgccaccatttttagaaaaatggcttcttaagccatcaaaggtacgcacttcggggcaagttgccaaataatagcaggaaataattgtgccataacagatgaaaacggcggcgctgtcgatgtcgccgccgttttttcatgccggatattgccgttactcgcagttgcggcagcagaggtttctgtcgccgtaaccgttgtcgatcttcgagacgtaggggaagaacttcgcctcgccgatccacgccagcgggaacgccgcctcgtcgcgcgagtaggggtgttcccacgctccggccagttcccgggccgtgtggggcgcgttcgccaccacgttgtccgcctggccggcggccgcctcgcattcgcgcttgatgcttatcagcgcctcgatgaagcggtccatctcctccttgggttccgattcggtcggctcgaccatcagcgtctcgtgcacggggaacgagagcgtcggggcgtggaatccgtagtccatcaggcggtgggcgatgtcgccgcagtcaatgttgtagtccttcttgaaggaggtgaggtcgaggatcatctcgtggcccacgcggcccgtctcgcccgagtagtaggtgcggtactccgcggccagcgccgccgacatgtagttggcgttgacgatggccatctcggtggctctgcgaagtccctcggcccccagcattttgatatagccgtaggtgatcgggaagagcagcgccgaaccccacggggccgacgcgacggccgtgatgccctcgtcgccgcccgtggcgacgaccgggtgcgacggcaggaacgcccgcaggtgctcggcgacgcagatcgggcctacgcccgggccgccgccgccgtggggcatggcgaaggtcttgtggaggttgaggtggcagacgtcggccccgatatagccggggttcgtcagtcccacctgcgcgttcatgttcgcgccgtccatgtagacctgcccgccggcgtcgtggacagcgtcgacgatctcgcggatgcggctctcgaagacgccgtgcgtcgaggggtaggtgaccatcaggccgcacagttccgacgagtgctctttggccttggcttcgaggtccgccacgtcgatgttgccgcgctcgtcgcacgtcaccgtcacgatcttcatgccggccatggccgccgaggcggggttcgtgccgtgggccgacgcggggatcagcaccacgttgcggtagccctgtccgcggctctggtggtaggcgcggatgaccatcagccccgtgtattcgcccgccgcgcccgaattgggctgcaacgagcaggccgcgaagccggtgatcgtcgccaggtcctgttccagcccggcgatcaggtccatatagcccttggcctggtcggccggggcgaaggggtgcatgttctggaagccggccagcgagagcggctgcatgagcgccgcggcgttgagcttcatggtgcacgaacctaaagagatcattgaattggccagcgaaatatccctcaactccagcttcttgatgtagcgcatcagggcgctctccgagcggtaggcgttgaatacgggttcctgcaaatagggcgattggcggcgcagggcagttgggacgcagctttcggtgacggcctttaccgccttggctttcttgcctttggctgcggcgaagatgctcacgacggtctcgatctccgccgcggtggtcacctcgtcgaacgacatgcgcacgcgcccttcggagggatagtagaagttgatgccctgttcgagcgccagcgattgcacgacggctgcctcggcctcgacttcgagcgtgtcgaagaactccttcgacgcgaggcggtagtccatcgcctccagcgcgcgggcgacggttgcggcggccaggtgggcggtttccgccgcgcggcgcagcccttcgggaccgttgtagacgcagtagaagcccgtcatcgaggccatcagggccgaggcggtgcagatgttcgaggtggcgcgctcgcgcttgatgtgctgttcgcgcatctgcaaggccatgcgcagcgccttgttgcccagccggtcgaccgagacgccgatgatgcggcccggcatgttgcgcttgaacgcctcgcgcgtggtcatgtaacccgcggcgggaccgccgaagcccatcggcgtgccgaggcgctgcgccgaacccacggcgatgtcggcgccccactcgcccggggctttcaggagcgccagtgacagcaggtcggcggcgaccgttacgagcgcgcccttggcgtgcgccgcagccgtgaagtccgagtaatcgcgcacccggccgtcggcggccgggtactgcacgatggcgccgaactcccggcccgtgaattcgtattcgtcgtagtcgtcgacgatcagttcgatgccgaacggctcgctgcgcgtgagcagcacgtcgagcgtctgcgggaagatgttgcggtcgacgaagagttgattccgaccttcccggacggcatcccgcgaacgtaatgaaaacatcatcgccatcgcctccgcggcggccgtgccctcgtcgagcagcgagcagttgccgatctccatgcccgtgagcgaaatcacggccgtctggaagttcagcagcgcttcgaggcgtccctgcgaaatctcggcctgatagggcgtgtaggaggtgtaccaggcggggttctcgaagacgttgcgcgtcacgacggccgggacggccgaggggtagtagcccatgccgatgaacgagcggtagggctggttgcggtcggcaagctcgcggatgtgcgccgcgaattcgtattcgctcatcccctcggcgggcagcgcgagcggtttgcggagccggatggattgggggatcacctgcgagatgagttcatcgacggatttcacgccgatcacatcgagcatggccttcaggtctttttcgttgctgacgccgatatggcgttcggaaaacttatcgaacattgaacgatattttatgttgtctgtatgtacttttcacatttgtctttcatcccggcaagccgttctcgccgcctgtggcggcgtttgcaattctgatcccatcccggccctccctcggggagggagatggcgtacgctccgcacggttcgtacagttgtgccgttgcacgaacacacaaaggtaaaataaaagaaacggacgcacaaaattttccgcgcctaatattgaaaactgctgccgccaatgaattcgcgcaggatcgacgtgggcgggatctcgtcgggcgcgatggggatgaagttgtcgaggaacttgagcatgcgccgcgcctcgtcgtactccggaaccgtgtcggggacctcacggaggatcttctcggcgaagggccgcagcaccgaaatctcgtagaacagcgacgagttgagcatgatgtcggcgttctcctgataggggaagatgtgtttctcctcgccccggcgcaccgaggcccagcgcgaaagcgtcgagagcgcgtcggcgccgcgctggcggtagtcgcgcgtcaggcgccgcagcaggcggttgtcggtggtggcgatgcgcgagaggttgtccatcgccaccgacgtgaagcacgagatgtagatgcggaacttctgcgcgtcggggatcgagggcgtgaggcgcgggttcagcccgtggatgccctcgatgatgaggatcgagcgttcgtcgagcgtcagcggcgcattgtgccacgtgcggcgtcccgtgatgaagtcgtagcgcgggatgtcgacgctctcgccccggatcaggcgcgccagatggtcgttgaaaagctccaggtcgatggcttcgagcgcttcgtagtcgtagttgccgtcggcgtcgcgcggggtcttctcgcggtcgacgaagtagtcgtcgagcgagatcagcacggggttcagtcccagcacgcccagctggatgcccagccgtttggccgaggtggtcttgccgctgctggaggggccggagatcagcaccatgcgggcgccgcgcgaaaggtgggcgtcgtagatggtgtcggccacccaggcgaacttgcgctcgtggaacgcttcggcgagtttgatcaggccgccgccgtcgcccgcgagcaccttcgaattgacgtcgccgacggtgggaacgcccatgatccggacccacgactggtactcctggaagatgccgaacatcttctcctgatggacgttgcggtgaagcgtgtcgggcgacgtgcgcagcggaagggccaggtaaaagccgttgtagtagggttcgatgtcgaacagcgtgacatagcccgtcgagggggccagcgagccgtagaagtaacccgccgtgtcgtcgagcgtgtagagctggctgtaaagccgcggacgggtgtccagaagcgcgatcttgtccgtgaaaccctcctcggcgtagcgggcgcggacctcggtggtgagcatgcgctggcgcgtgatgggcaggttgcgcacggagagttcccgcatgcggtcgcggagctgcgccgcctcgtcgggggtgaactcgtcgatgccgtcgatctcgcagtagaacccgctctggcccatcgagtggcggatgtggagcgtctgccccgggtagaggtccttgacggccttttgcagcaggaaccacgcggtgcgctggtagacgcggatgccggcgaaggaggtgatgtcgacgaaacggatcgtcaccggggcatatattttgtaattcaactccttgatgcggttgttgacgaaggctgcgaggaaggggtgaaggccgggcgtgaggcgttcggcgacctccagcagcggggttcccatcgggacctccagttcgccgaagccgttttcgcagatgactttgatcgtatcgttcatggaaaagtttttacaatgttcgattcgtaaagataggaattatttgtacttttggcaaatcttcatccataaagaaaaacaatgccgacgaatatgaaaggaatgttccggacgggcctgattctccttgcggctgcggctgcggcctgcgcaccccgtgaacggacgctcgtgctgctctcgacgaacgacatgcacgccaagattcagaattttccgcgattggctgcggccgtggagaactgtcgtgacaccgcgcagctggtggtgctggtcgatgccggagaccgctggaccggaaacgcctatgtggacatggccgcgacgcccggcatgccgatgatcgcgctgatgaaccggctcggctacgacgtggcgacgctgggcaaccatgagttcgaccacgggcaggcgtttctgggccgcatgatcgacagcatggcgttcgaggtggtgtgcgccaacgtgacgagcgacacctgcacctttccgcagctgccgccctatgtcgttctggacaaggacggcatccgcatcggtttcgtcggcgtggtgaccaactacgaaggcccggggcatcctgcgggcaatgcgtcgagcttcgagggactggagtttcccgatccgcaggcgatggcgatgaagtatgccgccgaattgcgtccgaaggtcgatctgctggtgctcgtgtcgcacatgggcgacgaccgagacgtggagctgctcggaaaggagacccggttcgacgtggtgatcggcggacatacccatgtgaaggtcgattcgctggtgaacggcacgcttctgacgcagaccgggaaatatcttaaaaacgtgggcgttacggcggtccggtttcgcggcgggaagatcgaaggcatcgaatcgcgcctcgtgccgctggacggttatgcgcccgatgcgtcgtatcaggccgaggtggaccgctactatgccgatcccgagctgaacaagcccgtcggagcgttcgccggaccggccgacaagtggggcctcgccaactggatggccgcgtcggtggccgacgaagccgatgccgacgtcgggttttaccacatcggcggcgtgcgcctcgactcgattccggcgggcggggtcggtgcggcgaaggtgtacgacctggagccgttcggaaccgagatcgccacgatgcggatgactccggccgacatgcgccggatgatcctctcgaagtacaatgacgaggagaaccgcaaggaggcgcaccggatcgacctgatctcgacgacgccctacgtcatcgtgaccgacgccgcggacaacgccctcgacgtgcgtttcccgaagttgcgcgaaggcaaggtgtacgaagttgcggtcagcgactatgtttacaggaattacaaggacctgaactacaccgacgggaaactcacgggaacggcggtcgcgggcgtgctgctcgaagagttgcaggatgacggtccgctgactccggacaacaggccgcggcagaaaataattcggaattcataattggggattttgcagagccgggttttgtctgtaaactgaataattctgaattccggattttgaattctgaattataagaattacctttgtagccctcgcgcgcgtgcaatgatgccgtaagcgagggctataacttttaatattaaccaattaacgagcgattgtatcgcaaaaatttccacaatggaagaagtaaagaatgtagttgcaaacgagaatttcgactggaacgcctttgaaaacgacctgggcgtgtacgaccaggacaaagcccagatcaccgaggcttacgacaagacgctttcgaacgtcaacgtcggcgaagtggtcgagggaaccgtaacgggcgtcaacaagcgcgaggttatcgtcaatgtcggctataagagcgagggtatcatccccgtatcggagttccgctacaaccccgacctgaaggtaggcgacaagatcgaagtctacgtggagtcggccgaggacaagaacggccagctggccctttcgcacaagaaagcccggcagctcaagtcgtgggaccgtgtcaacgaagcgctggagaaggacgaaatcatcaagggttacatcaagtgccgcacgaagggcggtatgatcgtcgacgtgttcggcatcgaggcgttcctgcccggatcgcagatcgacgtgaaacccattcgcgactacgacgtatacgtggacaagaccatggagttcaaggtcgtgaagatcaatcaggagttccgcaacgtggtcgtgtcgcacaaggcgctcatcgaggccgaactcgaagcccagaagcaggtcatcatgtccaagctggagaagggccagatcctcgagggaaccgtcaagaacatcacctcctacggcgtattcgtcgacctgggcggcgtggacggcctgatccacatcaccgacctctcgtggggccgcgtaaaccaccccgaggagatcgtggcgctcgatcagaagatcaacgtcgtgatcctcgacttcgacgaggccaagaagcgcatcgccctgggtctgaagcagctcaccccgcatccgtgggaggcgctcgatcagacgctcaaggtcggcgacaaggtgaagggccgcgtggttgttatggccgactacggcgcgttcgtcgagatcgctcccggtgtggagggtctgatccatgtttcggaaatgtcgtggagccagcacctgcgttcggcacaggagtttatgaaggtcggcgacgaagtcgaggccgttatcctgaccctcgaccgcgaggagcgcaagatgtcgctcggcatcaagcagcttacgcccgatccttgggagaatatcgaagtcaagtatcccgtcggcacgaagaccacggccaaggtgcgtaacttcacgaacttcggcgtattcgtcgagatcgaggagggcatcgacggtctgatccacatttcggacctgagttggaccaagaaggtgaagcatcccggcgaattcacgtcggtaggcgccgacatcgaggtcgtggtgctggagatcgacaaggaaaaccgccgtctgtcgctgggacacaagcagctggaggagaatccctggaatgagttcgagaaccagtactcggtggacagcatccacgagggtacgatcaccgagatgaccgacaagggcgcagtggttgccctgggcgagaacatcgagggcttctgccccgcgcgtcagctcgtcaaagaggacggcacgaccccgaagacgggcgacaagctcaacttcaagatcctggagttctcgaaggccaccaagcgcatcaccctttcgcacctgcgtacgtacgaggaggcgaagcgtgccgaaatcgctgccgagaaggccgagaagcgcgctgctgccgacgctacgaagtcgaccgtgaagaagatcaacgcttcggtcgagaagacgacgctcggcgacatcgccggactggccgctctgaagagcgccatggaggctgccgaggccaagtcggccaagaaggctgccgccaagaaagaggacgaagagtaatctccgctgaaaagaggacggggggaagatgcccctccgtatccgataaccggatgcccgcacaggaaactgtgcgggcgtcttttttttgtgccgggacggcggcgcgcggcgggagctgtctgcggggcggtttgtttatgggatggtctgtctgcgggattgtctatgggacggacagtttgcggctccggaatcttttcaaggacgaggtcagggccggaaccggggaaccggacagggaaacagggaaacagggaaacagggaatcggggaatcggggaatcggggaatcggggaatcgggggcggaagtccggtcggttagtggtcaatggtcggatcggtcggccaatcggcggccggtttgcaggccggatgtttccggggcggggcgaatggccttttttgcgttcgccgaaatatttacggcggatttcttgcaccgtgcgcaataacccggtatatttacaagtcagaactgaagaagcaaaccgatagatgatgaaaaagttgattttaggcctgttgtccgcgctggcgctccttccgggcggcatgctgcggagcggggatgtccgcgccgccgaaaccttcgccgtgcagtctcctcgcagggatcactgcgcgaaccctcacgcgaattgtcatggggagcgttacgaagatcggcgcgggagatataccaaagacagctggtcggtatattaccgcggccggaaggtcgagggggcttcggtatcctcgttcgccgatctgggcggcggttacggcaaggacaattggacggtgtattaccgcggccggaaggtcgagggggcttcggtatcctcgttcgccgatctgggaggcgggtacggcaaggataattggacggtgttttacgaaggccggaagctggaaggtgcctcggccatgtcgttcgagtataagggacggggttacggcaaggacaactggaacacctatttccgcggggagcagctccggcccgggcagtcgccggacgggatgctcggcggcggttatgcgaaagacagctggtcggtatattatcgggggcgaaaggtggaaggcgtttcggcttcgtcgttcgaatatctgggcggcggttacggcaaggacccctggaaggtggtctatcagggacgcaaagtgccgggcgcatcgtcgtcgtcgtttgaagagcttgggtggggttacgccagggacgcgtggaaggtttactactgcggcgaggtgattccgggtgcttccccggcgacgttccgtattccggaccggcggtaacgggcgatttgcgttatatatggggctttctttgcaggaagccctttttttgcgccgtgccgtgtggggattcgggcactgtttttgtctttgcggggtaaacgacgaaacgaatgaacagactgaaaccccatctggccctgttggtgtgcaacgtcctctgggcgatggattaccctttttacaacatagtcctgccgcattacgtgcatccgatggcgatggtctcggcgtcgctcgtcgccacggcgctcttttcgctcgtgccgctgctgtggcagaaggccgagaaggtcgagcgggcggatattcgcaaactgatcggcgctgcgctgctgatcggcgtattgcgcaaggtcttcatcatgtacggtttgtcgatgacctcgccgatcgacggttcgatcatcgacaccatcgtgccgctgctggtgctggcgctctccgtgctgctgggaatggaccgtttcacccggctcaagatcacgggactcgtgctcggcatggcgggagctgtggcggtggtgctggccggggcctcgtcgtcgcacgcgcattcgcatctctggggaaacgtgatgatctttctatgcgcctgcgtcacgtcggtgtatatggtgtggttcaagcggctgatcgccaagtaccgcattacgaccgtgctgcgctggctctactgcgcggcggcggtcatggccctgccgttaggtatcggcccgatcgttcacaccgatttcgcggccattgcccgtcacgccctgtttccgacgcttttcgtgctgacggttccgacttatatccccaacctgatgctcaactatgccctcaaaacggtacagcccaccgtgtcgagcatctacacctatttgcagcccgtgctggcgatcgccatttcggtagggatggggctggacaagctgcatgccgatacggtgattttcgcactggtgattttcgtgggggtggggctggtgctccggtcctacacggtgaagccgcggcaggccgatccgcctgctgcggggccgcattgacgaacgtcgtcaaccaaaaagagcctcccgcatcgggaggctcttttcatacaaatgtcttttcgcgttactcggcagcggaaaccgagaacttgatcgtagccttgacctccttgtgcaggcggaccgtagcctcgaactcgccgacggtcttgacggcctcgacgctgatctgcttgcggtctacggtgatgcccttggcggcgagcgcctcggcgaggtccgttgccgtgaccgtaccgaagagtttgccctcctcggccttcaccgacagcgacagcggcaggttggcgatggtctcggccagagcctgtgcgtcggccaggatcttggcgtccttgtgggcgcgctgcttgaggttctcggcgaggaccttcttggcggcggcggtagccgacttggcgtagccctgggggatcaggtagttgttggcgtagccgggcttcacgttcacgatgtcgttggcgtagcccaggttttcgatatctttgatcagaattacttccatggtcttgtcctccttttaattatttcatgcaatcggttacgaagggcaggatggccaggtggcgcgcacgcttcacggcctgggcgaccttcttctggaacttctgcgaagtacccgtcaggcggcgcggaagaatcttgccctgctcgttgaggaacttcttgaggaactcgccgtccttataatctacgtacttgatgccgagcttcttgaaacggcagtactttttcttcttgacgtctaccgatacgggattcaggtaacggatttccgactgtgctttgttgtcctgtgccatggtttactcctcctgcttgttagaaagttttgcacgacgcttctccgaatattccacggcgtatttgtcctgcttgaaagttaagaaacggatcacgcgctcgtcgcggcggtactgcgtttcgagcgtgttgacgagcgagccttcgcccgtgaactctaccaggaagtagaaaccggtggtcttcttctgaatagggtaggcgagcttgcgaaggccccacgactccttgttcacgatctgaccgccgttttcggtgatgacaccctggaatttgtcagcgacttcctgcacctgtgcatcggacagaaccggcgtgacaatgaaaacggtttcgtaattgttcataatgcttttaattagttaattaaatccccaaagggaccgcaaagatacacatttaaattaaaaatgaaaaattaagaattaaaaatttgtcagtatttggattatctctgctttttcctatctttgtggaacatactgacaaacacggaaagtgtaagtttattcccgataagcgaacgtaggaaattctctttggcgaggaataggcagacttcttgccgcttacgcaggctccccgcagggtagaactgcggggggcctgctctcgactgcgcttcgggcggacttccgcaatttgtttcctgaaaatggtgccggattatgggattttgcgtatcttatcagcgaattcaatcctaatgctaacccgatgataagacattgctttttcttgatttttgccgtgcttccgttttgcggcttgcaggcgcaggatacggccataagcccccgttatccgggggccgggtgtttcgagggtgaggtggctgtcggggcgacctttggctatgcctcgctcggaagctttgacaacgatgcggcgggcttttgcctggtcgctgaaagtcgttacaatttccggagaactcccttcgatgtgggtttgcggctcggcgggtcgtgttactcgcggctggctgcgggcgtctgctcgcaggacccttttatgatgttcagcctgatggccgttgcggattacaacctgcatctgacgccgaaagtggcgttgttcgcgggagcagggatcggtggggcgtatgtcctccgaacggccgaaggggctgtctccgatactccgtccagcgactgtgcggcattttgcgtgatgccgcgcgttggctgcgaatgctggaaccggctgcgcgtcacgctgggttacacctgtacggagcgggccaaccgccatctgtcgctcacgttcggaatagccatcggcggcgggcggcggtaagacgcttattcttccgggaacccttgtgccttcagctttatgtcctgcccgtcgggcgtcacgaggtaacagcccgtggaggcgggggtgatgtggccgatgacgtccacaaggcccagccgcatgatctgttcctgcatcgaaagcggcacggtgaagagcagttcgtagtcctcgccgccgttcagagccgcaacgaccgggtccgagtgcatctcctcggccagcgccgaggtctgccgggcgatcgggatgcgttcgaggtagatgcgcgcgccgcaggccgacgatttgcagatctgcatcaggtcgctcgccaggccgtccgagaggtcgatcatcgacgtggggcggatcttttcttcggccagcgcacggacgatgtcggtgcgggggcgcggcttgaggtatttttcaagcaggtattcgtagcccttgaactgcggctcggggttctccacgtcggcaagcacccgcttttcgcgttcgagcagttgcaggcccatgtaggcggccccgaggttgcccgtgatgcagacgaggtcgttctgctgcgcaccgctgcggtagacgaccttctcctttttggcgtagccaagcgtggtgacggtgatgaccagccccgtcatcgaggcgcgcgtgtcgccgcccacgaggtcgatctcctgctccttgcaggcgaaggcgatgccttcgtagagctcctgaagggcttcgacgggcagtttcgacgagacgccgagcgacacggtgatctgcgccgggagggcgttcatggccaggatgtcgctcacgccggccgtcacggccttgtaacccaggtgtttgagcggaaaataggtgaggtcgaaatcgacgccttcgtagaaagagtcggtcgtgcagagcaccgcttcgccgcgtcccggggcgatcaccgcggcgtcgtcccccgcgcccttgagcgtcgaggcgttcttcggggtgaatccgctggtcagcaggtcgatgagtccgaattgtccgagcgaagcgatctcggtgcgctttttctggtccatgaatctaaaattttttacaaaattaaggaaatactcttgtttccccaaaaaataacgtaattttgcccggtccaaattactaaaagggttagttatggtaaatatcgtcttattcggcgctccgggttgcggcaaaggcacgcaggcacagcgcctgaaggaacactacggaatcgatcacgtttccacgggcgaggtgatccgtgacgagattcgccggggtacggaactgggacagagcatggaagcctacatcaaggccgggcagctggctcccgatgagatcgtaatcggcatgatcgaccactatgtcaccgggcacatgaacgccgccggctgtattttcgacggctttccccgcaccacggttcaggccgaggagttcgacaaaatccttgccggacacggcctgaaggtcgatgtgatgatcgacatccacgtccccgaggaggagctggtgcgccgcatcctgctgcgcggcaaggattcgggacgcgccgacgacgcttcggaagaggtgattcgcgggcgtctggatgtttaccgcgagcagacggccgtcgtggcggactactacgccgcacagggtaaatacgcctcggtcaacggtacggggacgatggaggaggttttctcccgcatcgccgcggtgatcgaaggcctgaaatagcggggcaggcccggaggggccgggaagcgctcccgaaatgaaaatcgtccctgccggagttgtctccggcagggacgatttgtgtgaaatccaaatccgccggacgtcgcttgtcgccgcgccgggcgggatacggaaaaagccgcccgtttccggtgcggcttttctgtctcggtgcgggagcgctcctccctcggacgaagatttagagtgcgttcacgtgaagctggatcgaactcttcaggttcgcagccttgttcttgtgcacgatgttgtgctttgccagtttgtcgagcatagcggttaccttcggaagcagggcctcggcggcgctcttctcggtggtcgtgcgcagggccttcacggcgttgcgggccgtcttgtggaacaggcggttgtgagcgcgcttcgtcagggtctggcgaattctcttcttcgatgacttatggtttgccataatccgttaatttttattttttactttttttcagtcgtttggcttgaaacggccttggccgctttcggatagacccgggggtccgctcctcgaaaagttttttcacccgtagggggcgtgttcggcggtgcatttttcgattccggtctcccgtcttcctttttcgcgcccctcttccggccccttcgttcgtagcccataggagagtcgaactcctctttcaagaatgaaaatcttgcgtcctaaccgatagacgaatgggcctttaccactatcgcatgccccgaacggggttactttagcggtgcaaaggtaagcaaaaaagtgacttgtacaaaaaatatgcgaaaaaattacggattttttgccggaagtccctcggacggtcgtttcttgagctgtcagcgcagccgtacggtccgcgtctcggggtcgaagcgggcgttttcgcccgagaagagacgctcgatcagtccgctgccgaccatctcccccgcagggaggtggtggagcgaaggggtgtcgatcagcgccaccgagtcgcagagcgaaagcgccacgtcgaggtcgtgcgtcgagaagaggatgcacttgccctcgtcgcgggtcagccgccggagcagcgtcgccagctcgtagcggttcgggaggtcgaggaacgccgtgggttcgtcgagcaggatgaccggggtgtcctgggccagcgcgcgggcgatcatcacccgctggcactcgccgtcggacatacggtccatggtcttgcgggcgaaggccgacatccctaccaggcggagcgaacgttcgacgacggcgcggtcggcctcctgcatgcgcccgatccagttggtgtagggggcgcgtcccagcgccacgacgtcctcgcaggcgaggttggcgatacggaccttgtcggtggtgacgaaccccacggtcgtggacagctcgtggggcgtgagcgacgccagcgggcggccgcagagcgccacatcgccggagacggtcgttccgagacctgcaatggcccgcagcagggtgcttttgcccgtgccgttgcggccgatcagcgcggtcagcgacccttgggcgaaggcggcggtgacatcttcgagcagcgtgcggctgccgtaggagagcgtgatatggttgagggcgatactcatgtcagaagatattgcggttgcggacgacgacgaagatgacgaccggaatgcccatcagggccgtgatggtgttgatcggcagggcgaggctcttggcgacgaggtcgcagaccagaagcagggccgcgcccgcgagcatcgaccccggcatcaggatgcggtggtcggccgaggcgaaaagcatgcgtgcgaggtgcggcacggccagcccgatgaaacccaccgggccgcagaaggcggtgacggtgcccgcgagcaggaccgtggagaggaagatcagcgtgcgcgtgcgctgcacgttgagtcccatcgtgcgggcgtagttctcgcccagcagcagcaggttgagcggcttgatgacggcgacggcgagcgccagtcccgcggtgacgacgggaagcagcagcgcgagctggctgcccgtgacgtcgcccagcgaccccatggtccagatgacgaacgatttgagcgccgcctcgctcgacaggtattggaggatttcgaccaccgaactgatgcccgaaccgagcatcatgccgaggatgaggatgaccatgatgtccttgatgcggcggctgaccgccatcacgatggccagcacgagcgccgagccgagccacgcagccccggccacgcccagcgaccggacgaacgagtgtcccgcgacgcccagcaggggggcgcccagcaggaacagcgcgacgccgagtcctgcgcccgagctgacgcccagcacgtagggaccggccagcgggttgcggaaaagggtttgcatttcgagtccgtcggcagcgagggccgcgccggcgaacagggctgtgacggctttcaggagcctgatcttgaggatgatgtcgctggtggcagggtcgcaggagccgcctgtgagcgccgcccagacatcgcccaacggcacggcgaccgatccgacggcgaggtcggcgatgaaaagcgctgcggtgagcagcccgagcgccgtgaaaaggaacgtggttctgcgtgcggtcatttagcggtactggaatttgaacgagattttgtaacgggcgccggcgaagccgtagcgcgaatcgcgcctgacgtcggcccgtccgtcggcgtagtggcggaaccgcgtgccggacccctgcgcctgcgcggcgggctgaaggcagaggggcgaaaggtggagaatggcggcgtttttcatcttattcgaggcgtttgtaataacaggtcgggacgctgtcgcccaagaagatcgtccgcaggtcgcgcagcacgaggtcggggcgtacgacgcccgattcccagaagtcggaacctccggccggggtttggcggcggttgttgttgtagacgttccggctgcgcacgaccggaatgccggaaaatttcgggttctgggccgtcagttccgccagcgtgttgcagggaccgacgttgagccagaaatcggcggcgttggccagcaggtaggcctcctccatgtcgacggccaccgacgtgtccgaatcgttcttcgtgtagacgtactccccgccggcatcctcgatcaggcggatcatgtagctctgcgatgagggcaggaaccaggtgtcgcggtagggggtgttgagcatcaccttcgggcgcggtgcatccggggcggggtgtgctttcagggcctggtagtcccgggcgatccgttgcagcgtgtcggccccggccgcgcgcaggtcgcaaagctcggccgcgaggaccagccattcggccttgcccagcggggattcttccatgtagtcgccgatatatatataggggatgcccagttcgcggagtttgcccgtgacgatggtgttttcgcccgtcacgccgtagagcagcatgaggtcggggcgcatggcggcgagcagttcgaaattgaggttcgtgtcgtagcccacgtcgcggacctcgccgcagagacggtgttcccggacatagggattcgagatgtagtcgatgcccgagacgcccgaaatacgcttggcctgtccgatggcgtcgaacatcgccacgtggctcgacgacatgcacaccacgtggcgcacgggagcttttacgacctgtccggcgaagtcggcgggggctttggcgtcgtcgcgcaggatcagcaggtgctgttcgacgttcgtgccgccctgccacggattgcggatcgagacgagcgtcgaggcgttattcccgttcccgcggatgtcgaagcccgacgcgtaggccggggtgtaaatctcggttgtgaaatcgctcaaaactggccccgaagagcctccgcaagccgatgcgagggccgcggaaaaggttagcagaagacgtgaaaatcgtttcatttccgcaaaaatagaaaaaaatcctgcggaaatgtgtttgtttttgaaaaatatactatatttgcagtcccaaagcgaagggttttgctcttttgccgaaggaatcggggcgtagctcagtccggttagagtacacgtctggggggcgtgtggtcgctggttcgaatccagtcaccccgactgatgaaaaatccttgatattcaatcgaatatcgaggatttttcttttgtggtatatagtccgaaaaatggcggtggtacacaagtggtacataaatggtcgctattcgaaaaatttcaatctcagtcgttaagtatttggctgttggttagttgctgtgcttgggcctatatagtcgctccgaacaggcggataatgaattttatcaggtttgtggctatatgagctgtaattgcgtcgcagtagctcctattagtgtttcatataacgcttgtcatcaacaaataaaccgaaatgattggagttttatcagtaaaaacttggtattatagtagtttcatcctctaactctttgttgttcgcattaaatttaatattttagaggaaaattcttttgtattatggaagcaagcaaggttattacttatagtcttttggctcaaatccggaattcgggcaattttgtgaatagctctgttgagatatttgtcccgatagtaaaatatgcgttatacccgttggttgaattaaaaagttagtaaaatgacaaatgaaaggttgtgcatatttctggtttttagtaacttaatagcatccaaactattgagttcaaaccgtcgtatgcacaacttcatcgaaaaattcacaaaaatcaacgacatctgcaagaaatttgcaggaaatcgtgtaaatgaacatggcaatgtatctcgccgtggagttattcccacc

SEQ ID NO: 41 - DNA, 207063 bp, Alistipes shahii
  source 1..207063: mol_type = genomic DNA
caggctgcgtgcacgtgcccagcagggccgcggcgaataataatccggtaagtttcatctattttccagtttgaagttcgaaagtaagtttgccgcccttgagcaagtcatcgtgcaagatacgataatttttcagcggtttatcgccaagcgtcatccggtcgatatacccttcgccgcgtttttcgatcaccagcgttccccgctccgtgtcgatctcggcccgatcgaacgtcggggacgtcagcgtgtagtacggttcgcccgggcagtcggggtagaggcccagcatcgtgaagacagcccacgccgacatcgtccccgtgtcgtcgttgcccgggatgccgtcgggggcggtggtaaagtatcgctccaacagccgccgggtttcccgctgcgtgcgccactcctcgccccggaagcggctgaaaaggtaggcataggcgatgtcgggttcgttcgcagggtcgtacaacccctcgtcgaagaccatttgcagtttgtcgatgaatttgcgtcgtccgcccatcagcttcgcaagcccctccacgtcgtgcggaacgtagaacgtatagttccacgcactcccctcgtggaagcccggagccgccgtgaagttctcgcccgccttcgggtcgaaggggcttaaaaacgatccgtcgggatggagcggacgcaaagtcccgctttccgggctgtaatagcgcttatagcccagcgagcgggcgcggaacagacgcgcgtcgtccccctgtccgagcgagtcggccaacagcgacagcgcagcgtcggccatgtagtactccagcgcgtgcgagacggaggtgtcgcccgcaaggtccttggcgtagaaccccagcgggatatagcctttctcgatataggggtcgatgtcgggccgcatgcggttctgcgcaccgggcgtcgtggccgacttgcgcatcgcctcgtaggccttggcgacatcgaaatcccgaaggcccttcatccagctgtcgacgatcaccgggatcgcagggtccccctccatcgtgaaggtctcgcggccgtaaagctcccatttcggaagccaaccccactcctcgtacatccccgtcatcgagcgcagcatctcccgctgacgatccgggtagaccagcgtcagcagctggtgcaggttgcggcaggtgtcccacagcgagaagaccgtataacgttcgccatccgtcacgcccgtctcgcccgaacgctccatcagcgggtattcgccgttcacgtcgctcacgaggttcgggtgcagcagcgcatggtacaacgccgtgtagaacaccctctgctgctgctcggcgccgccctcgacccggattctgcccagagcctcgttccagcccttgcgggcctgttcccggatggcgtcgaacggcgcgtccgcggcctgctcggcatcgaggtttttgcgcgcgttctccgtagagacatacgaaatgcccatgcgcacctccacctgctcgcccgccgcaaggccgtcgaaggagaaccagtagcccacgtcgtcgcccgaaagctcgcgcccgtactccgtgtagagtttatacctcccgttgtccggcgtccactccgcctccacgcccgtcatcttccgttgcttcttccaatagccgccggcactcggagtcttcgaaacccgaagcacgaagtacaccgggaaaaccttctgcgcattgtagcagaacgtccccagcaacttcgtgccctcgatctccgtggcgctcacccggcgaaccatcgcgccgctctcgttcgtaagcccctcgcccagatttaacagaatatgccctgtgccttccggaaaggtgtacctctcggccgaggtacgcgccgtggccgtggcttcggcaaggacgccgtacttgtccagaaagaccgagtaatagcccggagaggccttttcgtcccggtacgacgtgccgtactcccggtaatccaccgtcagagggcccgtcgtggccatcgtcagcagcgaccccatttcggggcaccccacgccgctcaaggcgccgtgcgcgaagcccgtgaagaatttgttgtggtattcgtagggcgtggaccaccagcgggcgtccttgtcgtagacgttctcctccgaccccatgacgttgaacggaaccaccgacatcatcccgtgcggcgtgacggccccggggttcgcggtcccgaagttcgtagtcccgatgaacgggtcgacccggtcggcaggggtctgcgcagaagccgcagcgccgaaaacggctgcggcgagcgccaaggtaaacagcgttcgtcgcagtcgcatcagaggatcgagttttgcttcgtgaagtcgataatttcagggatatagccgaacgcaaggcccgtgacggtgtcggcgcatccgtagtagacggccacgcgtcccgtcgcggggtcgtgcagcgcagcgcacgggaacgtaacgttcggaacgtcgcccatgcattcgtacgtttcgcgcggggagatcaggtagggaccgctgcgggccgtgaccttccacggctcctccaaatccagcaatgccgagccgaaggcgtagacatagccgttgcatgagcgaagcaccccgtggtagaacagcagccagccctccgaggtctcgatgggaacggggcccgcgccgatcttcatgcactgccacgccgaaacctcgaacgccgagggagacatcacatgacggtggcggccccagaactccatgtcggggctctccgaatagaagatgtccccgaagggcgtgtgacccgtgtcgctcggacgcgacagcatcgcgaaccggcccccgatcttgcgcggaaacagaaccccgttgcggttatagggaagaaatgcgttttcaagctggtggaacgtctcgaagtcatccgtccacgcaatgccgatcgtcggcccgtggtagccgttgcaccacgtaacgtagtatttgtcgccgatcttcgcaacgcgaggatcgtagccgtagacccactggccgatctcggcgtccgcaccctccagccggaagtcggactcctcgatctcccaccgaaggccgtcgaccgaaaagcctacgtggatgcgcatccggcggttcgtgtcgtcgcaccggaaaacgcccgcatagttatattttccttttttgaagggaacgaccgccgagttgaagatcgaattcgacgtcgaaagcgcatgacgcccgatgatcgggttcgcgctgtaacgccacatcacctctttggagccggcgggacgatcctcccacggcatatcgggctgattcgcgcccgcaattttcagtgtatccatataaattatttgtcgtttggtttgtcgtcataggtaaagggaaccagccgggtgatcacaaaagccggaatggtggcgagcatcaccgcgaggaagaagatccggtagctcatcagatcgctcaaaaagcccgaagccatgcccgtgagcatcaccgagaggttcataatacccgaagcgaaagcgtagtgcgccatctggtgacgccccggagcgacctgctgcatcataaacagcgtgaggcccacgaagccgaagccgtagccgaagtactccacgacgatgcccccgccgacgagccacatgctcgaaggctggaaccatgcaagcaaggcgtagaccccgaacggcaggttgaagatacagcacagcgtgaaaagagtgcgccgcagacctcgtcgggcgatgtagtagcccgccaaaagcgagcctatgagaaacgcccccgcgccgaaagtcccgtagtaaaggccgatctgctggttcgtaaggcccagaccgcccgaggccgtgtcggctttgagaaacagcggaacgatcttcatcacgaagccctcgcccaaccggtacaggatgatgaaggcgatatagtaccagatatgccgtttggtgaagaacgccgcgataacctctttcaggcccgaaaggccatcccgcagcgagcggccttctgaagccgaaccgcctgaaggaagcgcgcggagatggtaaaggcccaaagcgacgagcgtgacgcacaggagcagcaaaacgaccgtccacgaacggacataagcgtcgaacgatgcggtccccgaggtgctgaaaccctcgtaaagccaccccgcaagccacaccagaccgcccgtggcgaccagtttcgcaaggttgtagaacgccccctgccagccgatgtatttcgcctgggacgcaggcgatagctccgacatgtagactccgtcggccgcgatgtcgtgcgtcgccccgctgaaggcaacgaccgcaaagacagcaacactgaccgagaagaacagcggaaggtgaagcgacagggccgcgacgccgaacagaacgccgctcagcaactggctccccacgacccagaacttcttcgtccggtaaagctccaaaaaagggctccacagaaacttgatcgtccatggccacatgatcagagaggtccagaacgcgatctgagcatccgagatccccaggtccttgtacagaaccgcagaaaccatgttcagaaccacaaacggaagccccatcgcaaagtacaaactcggaacccattccaaaggagaatgtttaagatgactaagagattgcataatacacaactaaaagaatgcttaaaacattataaatatacggatttcatccgatatgaacaacttttttatatgttttatactaaatcacaataggttattacttattctgatatagtgcgacaatcgcgaaatacaatcttgtattttaacaaagaaacctgttcgaaattttttgtatcttgtgataggttatttgaaatgcggtatttgaacgcaataggctgaaaatagactgttgccttctctactgtataaagaatgtaacgactcgataaatcgagtcgttacgctctttcaatcccatagcagaatgggattcagctgccacacacgaaccgtcgttcccgacggacaggcaacgcttattttatccgctcgaaattagggcagactcatctccacccagttcatacccgggtcaccgatctgctgaccacccgaagagtggacgttgatttcacccagcatgttgttgcccgaaggagaatgatccttgataatctgacctgctccgtcgttgagtttccagtagcctaccagaccttccgaatccaccggaacggagtagaagtggttttcggcattgatctcctccttggtcagcgtgcggttccatacgcgcacctcggccatataaccggggaagaaacggtcggcgttgtaggcataaccgatccagaaagcacggttgtagtcgctctcggaaccgccgtatgccacacctaggttaaaaccggagtaattggagataccggttcgatacaaaagttctccgtcaatgtagaaataagcgaaagtatcgtcccacgtcacggcgacatggtaccagcgatccagttcggagagtttcaacttggtatccgtacggtttccgccttgcatggccagctgaatttggttccaaggcacattgacgtcgcccaggcggaggaggaatttaccctcgacacccatgatggtcgacaaagatccggatacgcgcgtctcctgaatattgaccagcgcctccatggtgccgttcttcaagctgttgagcgctccgccattcttcaaaaacgggaaatagcaacgcgagcggcgcatgtcggccacacactcgatcagacccttgggcttctgcgtaatattgatgttgaccgtcagcgcctcggagttgtcgggagcgttcttctcggtgagcacgacatcgcagctgcgagcagatccgttaaccagagcctccactgtgaagtgcaggccgctatcgtcggcattattataggtaaaccagcccgtcgccccctcgcttaccgtcacatcgaactcgacattggccgttaccggaatatcgagtgtctgagcctccacatctaggaaataggccaacttctcgggctcgatcttcgacttgggaagctgagttaccttcagcacggctgtgccgttcttcacacccttgatcgtcacggtagcctcacgcggagtctcaccgtcgttctgggccatggagaaataggccgtcacgtcggtctcggcgccgccctcggtggggcgggcaatcgtataggtcagccacccctcggtctccgatacgatttcggccgtcaggttgcgatagttgacattcgtcgtcaactccacggccaaacgctccacagccgtataagccaggcgcatttccgacttcgacgtgatttcgatggtctcgccagtttcgcctttctcgacgatctggaattcgacctccttactgcccatcttgaagacgtagttggcgctccgctcctcctcggtctcattgggatccacctcgaagactatctcggcaccgtcttctccactcgtagccgacggcgtcacgaaatcggactctccttcgagcgtccacgcgcccgagctggtaaccagcaccgtcaccttgccgccttcgcaggacaggatgttcgccccatcggcatagaagagttcgagctgctcctcggtctcggaggcctttttcttgagcgtaatcttgaaagacgcggtcttcttgccgcatgtgaacgtataggtgaagacctggtcttcctccttgtcgttggccttcacggtgaaggccacgatgtcgccatccttgcccttaacggccgaagggagcacataagcgttctcggcgccttcgagcgtccacgcgcccgagctggtaaccatggccgagacatcgccgcccttactccccacaacgccttccatcggcgaaacggaaatcttgtcttcggtagtcgaaggatccactttgtcgtcgctgtcatcgcaggctccgcagagtgcgagcgcagcagcggtaaaaagaaatattttcgaaattttcatatcttgtcgttcaggttttaaggatttgttcattaccagcgaaccggaaaacggcttcgcccggttccgaccgaacgatcggcggcatcccggccgaagccggaacgcacgaccgagtcgttcgttttcaagttagttgatcgggtgcggtgcgggatcgtattggccctcgctgatcttgttgtagacatttttgggatcgcgtacgctctgctcgtagcagccctctgccacgttgcggaactgccggagcgaatgcgaacggttgttgctgaccgttccggttccggaaggatcgaatgcgaaccacatgatccagccgtaaccctgattcatcagtgccttggctccagacgacgagatggagtagccatagttgagttggatagagttgccggcacatccgctcagtcccataccgtttaccggtcttgccgaactgccgtagtcggcgcagacgttgtcaatgaattcagacggcttatgctccacaccgtcgatgaataccgaaggcagagaggactggatatagcccaagtaatagaggtgtacccaagtctcccaggggcacaattccttcatcgcctttttggtctcgtagcagagacgggcggcctgctgggagctggggcctgcgaaccattttccggatccgtagtagctcgaatactcgtcatcgaaaccgataccatcgagtttatagtcgagacagatttgagccagctccttaccgaactgctcacaaccccagtcgctcaaaccagcgatgccggcctggtcgtggttgcccaagatgtcgagcaacaccttgatacctttcttacgcagcggctggagcagttcctccgagttgtcgagtaacgcctgcacgttggggttggctttcatgtagaccttctgcttcgaagcatcccagttgatgttgccagcgaatagcacgacagcatcgaaaaacggctgaccgtcctccaaaatgtactcaatggcgttgagcgggttgcagtcgttcacctcgaaataacagatgttacggatcttcttcgaaccaatgcgcgaaactaggaagtcaacgtattcagcctcatctttaacgacgataccctccgtttgggctacggcctgaaggggaaccatgtaggtggttacatactccagatcggaagcactcggcgtgagcgttacctcgatctgcgcagaggtttcaccggcggggatagtcatcacgccgtcgttcgcaatggtgcagagtttctcggggaatacgacatactcggtagcgtggtcgaagttgtactcttcgacatggcgttcgtcgaagacgagcttcaccttggtctcaaccatagcggtcttctccagcgtgaaggtcagggttttcttgacgggctccacggcatcgtgagcgaactggatgttcagatcatcggccgtcgagagcgaaccggcgatctcctcgcccggggtgggattctcgctgccggccttctgcgacacggcgatcttcgcagtcttctcaccctcgctggacgtcacgacgatctgccccacacgggcatctcccgtattgtccttggcgttgaccgtcagcttgtcgccctgcttctcggccgtcatccactcctcggggtaggagaacgtccagtcgggtgcattagtcgtaacggtcagttcaacggccttgttgccagtagcctcgaacccaatgggatccgacggcgaaatgctcagtacgatttcacctacttcaagccccttttggtttacgttgatgttgacgggttcggcgttaccggccgtaatcgtgatgcggcccggacgtacggactccgtggtattagcctgggcattcacagttagtttgtcgccgtcctgcttggcgacgatccactcaccgttcttctcgaatgcccacgacttggcgtcggtcttgacggtcagcacaacgtcctgattgtcgccggccttgaactcaatagcagacgcaggtgttaccgacagggaattctttttgttcacatcatcgtcatcgttgcaaccgacgagagcccccgatgaaatggcgaacatacccgttaaaagcatcagaaatgactttcttttcatgtttggttgattaggttaattaaaaaggttaaattaaagttaaggaattacgattcttcaggtaataaatctctcactcttcgggaagcgcgacgctctgccaattcacttcgcgctcggtcttcagatcgaagccgttgccggtataatccttgacggtcttacctttcgtattgtcgtcgaacttccaataagccaccagtccgtctgatgcgggatcgattttgtagaaatggttctcggaagcgatctcctcggccgtcagggccttgttccagaggcgcacttcgcccatcatgccgtcgaaacgacgctcgtagaacaagtcgccgtccgactggaggcggtacgagtggccgatccaaaagcagcgctccttgccgtccgtctcgtcggagtgcggaatggcgaagttgatcttgtcgatgatcacggcatgcccgtcggtaccagatactgaagccttgaccgtatccttcagcttgccgtcgatatagacgcagatagtgccacgatcgaatgtgacggcgatatgatgccaaacgaacagcttgaggtcataacggctgtcggcctcggccggaatcttcccgcgtgcaggcgaggtctcctcctccgaaaccttcttggcgaaggccacctgcaactggttagtcggacggccgtcgtcgcccaaacggatgaggaacgtatcctcgatgcccataattgtcgagatcttgcggtcgaacgagttggcgtagacgagcgcttcgagcgtgaaggtctccatgtccttcaccgcctcggtatcagccgtccactcgggccaggcgcagttgttctccatctcggccacgacgttgatgagcgcggccttcgagaagacgaagtagaccgtccgggcgctttcgaggatattcatgccgtcggccgacacgatgcgtacgggcagcacataacgctgcttctcctcgatgggcagattgtccaaattcgtaaaggcgaaggtgagcggcgcactctccaccatcccggccgtgatgacagtcgaattatccgcgaaatcgtaatagccgccgttggcagggagcagttcggccgttggatcgtcgtagaacatccggtagtgctccaacagaccgggagcctcggcgaacgtgaccgtgatgtcgcgctcccggggctgggccatggcgacggtaacgtcgcagctctcttcccgggtcacgtcgaggttgtcccgtttgataaacacgtcgtcggtgaacgacgtggcggagatgaacacctgattgctgaagtggtgtttgccctcctcatcctccttgcagcccatgaatacggctaccaggagcagacacaatgcgaatcctaatttatttttcatcgtcgtttttattttcgggattgttttcgggctcctcttcgggctcggggttcaggatgccgagcgcctcgcggattctcttgtatgttggcgtattgaaatagtcttcctgtgcgttcgatgcgcagagccccagcttatcgcactgtacagtctgggaggttttcggatccatcacccactgcgcggccacctggagcgaagcgcccacctgagcgtcgtcgccaccgtcggcgatcgacggcacggaggcttccagcacgacccggttgctcggaacaccctcttcgagttggtcgcgcaccatacgggagatagccaccgacgacgaggcaccctcagtcaggatgatgacgtagtcacactccgcaagaatcgtctggttctcgatgctcgtgatgaaggcggggtatccgcggaagaagagtagcttgttgggattgtcgcggcgccacgtgtccgccgccaggacgaacggagctgcggcgctgctgtcgtaaccgcccagataggagacgacgatgccgtcgaatccgtatcgggagcaggccgcaagctgcttttcagtctcggccttgcagtactcggcgaacttctcctccgtatagtcgccctcgtgctctgtaccgaaagatgcctccttcatggcgtcccaggtactgcggattgtcgtatagtccacgacgttgagcgtgcgggtacccttcttcgaacgtacttcggcgatctcgtccgacagcgccggatgcaggtcgtcgacgtcggtcatgagcaggtaatccacactgtcgggcatggacatcggatgctggttctgccggttcggagcggtcgaagttccccggacgatcatcatcgtcaccaggtgttcgccgaccttgaaatcccggagcgatgtcagaaaagccggatcattctgattcatcggcggcagaaaatctttgtgttcggcttccgtccagtcgctgcacgaggccagcagggccgccgcggcgaagaacggaatgaatatgcgtttcatgtcgaatttcgttttaatgggttaaacggtgtgtacggttatttgacggccggattgcagtcccaccacatgcgggttgccatgttatcggagccaccaagcatctccacagccttggcgtagttctccgggttgttggtcgcctcgtccgcaggataggacatgcggcgagcgccgagcgtaaggttccggatgccctgcgagttattgcccacggcagactccatggccggaatcaggtgcggaaagcctgtacggcggaaatcagcccacgcctcgttgccaagatggaagttggcgatccacttctggatgatgatgcgctcctgcatctcctccttcgaggcgctgtcgttccaagccacccccagctgggagagctgtatagaataggaggtcgcaccgccgttggggtcggtgtaggattccggaagagtggtgccgacaaggtattcgtcgacgcccgcaacaccccactgttcgaacgagaggcggacgccctgctcgtagaaggtcttagcgctgccacccatgttccagccgaacacgccgacggcttccgccttcaggaaggccacctcggcggcattcatccactgcaacggagtagccatgccatctacgaagttgacgcctgaatagagcagccccacagtgctgagcgctggaatggcgataccacgacgcatgcccacatactcaagggcattgtccccggagaactgtgccttgctgaaatatttctcgcggcgcggatcctcataaccgttcatgtagcagatgatgtcggctgcagcatgcgaatcgccgcccgtcaccgacccagctggggagttgtacatgcatgccgtatagagcggattgccgtccttgccgaaggccagggacgaaagctgcgcattgtctgcgttcgactgcatgacaccgacagagtgcgccacggcctgttcgcccaactgctgcggagagaggcccttcgagcttacgaaatcggtgtataccacccgcatggccagccgcagcttcatcgagttggcaaaacggcaccatttcacggctgtgccgtcgaagacttggtcggtcgtgctcgtgatgctcctgtcgatgttctcgtccaacagggcgattgcctcgtccaattcatcgaacatctgcgaatagaccttgggctggtcgtcgtaagccacctggatcttaccggtgcttccgatctcggaataaggaatcgggccataagtgtccgtcacacggttcaggacgcagaccttcacgatcttgaggatggccaaaacgagcggatcctccgaaatcccctccacgttcgacatgttactgtacagttgcgggatgactttgtcgctgtacatgaacacgttcgtccagttgtcggtcgggttgtatttggaaatggtgttcgtccagccattgttcgcatcagcgtaataaccgccctgcgtactgcccagcagacagtcagtgaactgcgccgtattgacatccgtcgagacgacggtcccgaacatggcagagagtcccgaggcgatggcgtagtccttggcctccatctgctccttgtccacctcgtagggattgctgttgatgtcgaggtaattcttggtgcatgcgcccagaacgcacacaactgcgaaggagagcgccgcttttatcaatttgtctttcatcgtgtcgctgttttagaatttgagacggagattgaatcctacgttgcgcaatgacggcatcatgaagtaatcaataccttgatagtagttgcccgtcgtagcgatgctttctggatcgaacggagccttgttgtagagcatccacagattgcggcccacgatagaaaccgtaatctcgcagacgttacgcagcagcttgcggggaatcgtgtagccaatcgaagcctcctgcaaccgcacgttcgtggccgagtaggtgtagaactgcgggatggaattgccgcctgcgatggccgaataccaagtgtaggcatccaccacgtcgccgccgttgagcgtcacgcctccggcatcgcgcgccgcggccgtaacctctgacacgccgtattggtcgagcatggcctgcgtacgcgagtagacgatgccgcccagacgggccgaaatcatgaagccgaagttcaggttcttccagcggaagtcgttgcgccacgacatgttgacatcgggcagtacgctgcccagcttgacatacttattcacatcctggatcgtctccgtagctacatttccgttctcgtcgatgtaaatggcattgttctcgtcgtagcgcaaatcgcggcgggagtagaggtcgcccaacgtaccgccctcctgcagtaggaactgtgcgtcgcccagaccgcccatgttgagccggtcgatcgagaagcgctcgcccgtagcgtagttgatgacgttgttggccagcgagatgatcttattctgattggtcgacagggtgtagttggtatcccacgtgaagtcgcgccaggtgttccgataacccaatgccagctcgataccctggttacggacgttacccgactggatgatgatcttggagaaacccgtaccgcccgagatctgcgggtcgaaggtctggttcgacgtatgcgaattgtagtaggtgaaatcgaggttgaaatgcttgaggaaacgcatcgtcagacccacctcgaacgacttggtgcgctcgggcttgaggtgataggtgggatactgcgtctgcgtgttccacgacaggccgctttcgttccacgaatagagcgggttggcgatgtaacgctcgaaggcaacgcccaccgaggcgaacgaaccgcgcaacttgatataggagagattttcaggcatgttgggaatgagctgcgacaacacgaccgaaagtccgaccgaaggatagaagaacgacttggcgttcgaatgcggacccgccagttgcgaaggccagtcgttgcgacccgtaagggtcaggtagtaggtgcccttgtatcccacctcggccgaagcgaagatcgactgcgtctgctcacgccagccttcctgcttacggacggtcttggtcgaattactcaagttctgaatgttgaagacgttggccagcccctgcttctcgcccgacgtaccgtcggcaatggggccgcggatcttcagggcgtcgttcttcatatccgagaacgaagcaccgatgttggcctgcaacgaccagtcgtcaccgaacgttttattgatattgagcaaagcatcaccataaacctggcggtccatcgtcttggtgacgccgtaaaggccgttggcggactgctcggtgagctgcacgttcgaggaagcatacatcttttcggtgtaggtgttgtgcgagttgtcgatgcggatgcggcctgaaacattcagccagtcgaggatgtcgtacgacagcgccgcgttgagcatgtaacgatccttacggttctcgcgcaggttgcggtagttcgcccagtaggggttctgcatggtgatggagccgtcacccatcggccagtactgtttcgaaatcttgtctatgggatcgtagcgctcatacatttcgatatccgcccagtcatcgccgcgcgggaagaggtaggctcccgtcagagggttgttgtaggttccctgattgatcatgttgcagtcttcctgcaatatgtagctggctcctacgtccagtctcatcttgtcgttcagaaaagaggaggtgttgcggaacgtgaagttgtaacggtcatagctgttgttgggcacgatgccgttggaattgatggccgcggctgaaaaataggtctggttcttctccgttccggtcgaaagcgaaacgctctcggaattggctacgccggtacggaaatagtcttcgcggggatcgtagccgtatcggttggcgcggttgagccgcttaccccagctgtaactggccacgttgatcggcgtagtaaggttgcccgtaccgtaccggttctggaactcgggaagaacgaacggagtcatgatctcaacaccggccgtcgcagtgacggagagctgccccgcctgtccctttttcgttgtcacgacgatggcgccgttggccgcgtccgagccatacaatgcagctgccgcagcacccgtcagtacggaaatcgactcgatgtcctcggggttgatgtccgcaatgggatcggtcgtaccctgcgaactgaactctgtgccgccctcctgggctttggtgaacatcggcacgccgtcgatcacgtaaagcgcattggaggtctgcgaaatggacttcataccgcgcatgatgaccttcgaagcgccgccgacgcccgccgacgaggcgttgatgttcacaccagccaccttaccgttgagcgagttgatgaagttggcgtccttgttggccgtgatggcatcggaattcacctgctgcacgttgtacgacagggctttctcggcacgtttgatgcccagggccgtaacgacgacctgctcgacctcgatggacgaattggccagcgtgatgtcgaaagtcgtacgcgagccgatgggcacgacacgggtttcgtagccgatgaagctgaccgacagttcggggttgtcgaccgaggcggggaccgtcagggcgaagtctccgtcgatgccggtggtcgttccgacggtcgtgcccttgatcagaacggtggctccgataatgcccaggccgccggaatccttcaccacgcccgagatggccgacggccgcgctgaggcgacgcgcttcgacagcacgatgttgggaaccgtgatctcataggtgatgtccgtgtccttgaacagcagcggcagcacctcgttgagaggcttcgaatcggccttgatcgagacgatgcgtttcgtgtcgatttcgtccgtataaaggaaaagatacttggtctgcttttcgatttcgttcatgacggtcttcatcggaaccttcgtcatgtcgagcttcaccgcgattttctgcgtttgggccacggcgggcgcaccgcacaggaacacggcgagaattagagtaatcaggcattttatctgcctaatacttaaatttttcataagtttgctgatttaagatcaataggttagcaatcgaatcactgtttatctcccgccggcggacacgaccgtgtccggacgcgtcggcggtgcagcataaaagtgtcttgaggcagaggcggtttattccatagagtcggtttagattttagttatttttatgtggatcgtattcgtctcgtcgtcgcgcgtataggagaagttattggtgatctggagcagcttcagcgcatggtccacaccgtccgacacgcggattttgccgtggtatttgagttcgggcatatcctcgggattgtcgatcgtgatccggactccgtaatagttctcgaatttgcggatcacctccgtgaacgacagcgtgttcaggttcatcagcccgtcgacccagcggaagtcgtccggatcggttatccggttgagtttgagatgtccgtcgaccaggtcgatctgatcgttgggcgagagaatgaaggattcgccgccgacgaggcggttcgagattttcagccgtccttcgagcagcgccgccgagaaatcggcggtccgggcatcagccaggatgttgaatttcgtacccagcacctcggcatcgcaggcgaatgtttccacgatgaacggacggctggcgtcatgttccacctcgaacatggcctcgcccgaaatcttgacccggcgtgtctttctggaaaagatcgaagggtattccaacttggcgcccgaattgagccatacggtcgtcccgtcgctcaaggtgacggacatgctctgcccgttgggcgcggtaatggccatcatgtcctgggtacggcgttcgagaatccggtcggccatatagtggcccaacccggcgcatgcgagcagcacggccgcagccgcggcactccattgagccgttctcttccagagcgaaacggtatgtctgcggatacggggctgcgcctctccggccaggatattgaggttggaaatataatcgagccgatcgagataccgctggttttccgttgacgcgtccagccagtcgagcacctcgacgagttcctcctccgaggtctcgtttctcaagtatttctgcaataaaagatcgtccatgtgttcgtgttatatagtaataacaaacacacggagggggtaagtagtaaaaaatgcaagtttttttgaaaaaagatcggaacggactcctgacagccctgcggggcgctatttcaccaccgggacgagagtatcagggtgatcagcacggccgggaggtaatccttcagttcggagcgcatcaggttgagcgcccggcggatttcgaaattgacatggctgacggaaattcccagttcggcggcgatctcgctgtatgtcatattcctgatccggcttaacaggaatacgctgcgggtcattttcggcatcttgcggactgcctgtttcaggatggcgcgaatctcttcggagaagagcagatcgggatcgcaggccgacagcgagcgcacgtcggcctgaagccggcgcgtcagcgtcgaatgcatgtcctgttccgccctgcggtggcggatctgggcgttgagatggttcaggcagcggtttttgaccgaagtgaggatataagccggcacattgatgtccgccggcagggtttcatgcatttcccaaaaggtcataaaactgtccgacaccaggtcttcggcagtctcccgatcgcggacatagcggtatgccagggcgataaaacggggcttgaattcgaaaaataacttcccgaattccgtggaggagatgctgtctgtcttgacgtctgccatttgaagtcccgtctgtccggtacacgaaaacaccggcgaacccgattcaggattcgcccatcaaaaattcccccccccgataaaaatcggattgggagtcattgataatgttgtatttaccaaatcattcaatttccggatgcttttgtcggacaggaaaccgtcggtggttcctatcatcgacaaagatagcaataaaagtgataattgagctgtttgcggtgaaatagttttccgatacggagtggccgaaacggcccggacgacaacaaaaacggccccggaaccgctttgcgaaaagagcggacggatgatttcgcctatatatattatcggtataggacgtcggccggatttccgccgcgcccggaacgccgtccgaggagattcccgacgaccggacatgcccggtttgcggcgtcggcaagagcaattccgaagaggtcgaggagcagcccggaaagcgaggcgcagccccgaaaaggagcgccccgcggcatttcggagagccgtttcaaaaaaatcgggggggggtatacaatcttcgccgatttttgctatttttgtccgtcgcgcacggtgcgcggttaagaatcaaatcaatacaatgatgaaaaaaatcctattcctgatggctgcaacggccatgatgtgggggggggtgatgcagtaaaggcacagaccctcgaacccgaattcgagggagaggtcgtcggcgtattccccgacggctcgtccaagaagctcgaaaaacacaacgtgcggatgcgaacgggcgccggcgtctacatcgccggattcgcagccagcaaatccaaaacaaaagtactcgtggaaggcggttcggccagcgtgcggttcgacgccgcgcaaccgatcgcgctcatcgtccgcgccaaggacaacaaggccgaccccatgtccatcgtgcgcgtcttccgcatgaagagcaccaagaaaaaccggtcggcggtgatctcggccgtcgggtcgttctcggtgaactccaacacgatggactacctgcggttttcggccgagaaatacggcgaaagctcctaccgtctgaccttcgacgaacgccccgcaggcgaatacggcatcatcgtctcgaaccccaacaacgtggacgagaagatggtgatcgtctcggcgttcgccatcgacggcggagccgcggcgaaagagtaagccggaaccacacggttccgatcagtgcggtgcagagcgattctgcaccgttttcgcttatcgcggagcaggtaaagagcccgtgagaatcgaaacgtcttcggtcagtgcggtgcagatgtcgtgcatcgtgaagaatccccggatgggtagtcctcggcggacgtcccattcggggattcgagggatgtgcggcaggtgcgccacaatcatcgaaaactaattgatgttgggcaggaacgaataatccttcgcgtagccgagcatctgtcccacgtagtcggccgggtaggagatcttcacgtcgacgatcctgccgtccttctccaccagttcgtattcgggattgacgaaaccgccgtaaggctcgatgtcgagcgcatagtagcggtcgcggacctccttgtgcagctcgggatcgaccgtgacggcatactgctcgaccagcgccttgccggcttcgtagtcgccctcggacttgatgcgctgcacctcgcggagcatctggccgaacaggtcgcgcagtttgccgaagtcgttgaccacggcgtaggtcttgccgttctccttcaccaactcgatcaccttgtcggccttgccgcgctcgtagcaccactcgcagatcagcttgcggttgcgcatgtgcgactcctcgacgttcttgcccggctcgatgcgcgccagctgggtcatcatgccgttgaggatatacttggcataacccgccttggcgacgtcgagcgagggaatcagccccagttcgaccagcttcggatcgcccaggtagtaaagcccgaacaggtcggcgcgggtctcttcgagcgtcgagccgtagctcttcagctcgccgcccttgacacccggagccagctggcccgagccgtgccccaggcactcatgcaggtcggtgtgcaggtcgtcggccagcttgccgtaccgctccatccgctcgcggtcctcggcgcggagcacgaactcctcgttgaaaccgttgccgtgagcagccatgtcgtaggcataggtgatgttgtcgatggtgaccgacttcgagccgtactccttgcgaatccagtcggcattgggcaggttgatgccgatgggcgtcgcgggatagcagtcgccgccgagcatcgccacggtgatgaccttggccgaaacgcccctcacgaccggcttgcggtaggcctcggccacgggcgaatgatcctcgaaccactgggcgttgtcggagatcacctccgtgcggtggcaggcctcggtgtccatgaagttgacgttggcctcccacgaagccttgcggcccagcggatcgccgtagtcctcgatgaagccgttgacgaaatcgacgttcgaaacggtgtccttcacccagccgatgttgtagcggtcgaactctttcagatcgcccgtcttgtagtagctgacgagcgccgcgatgttggtcttctgcggctctttggccacggcctgcgccttttcgagccagtagacgatccgctcgatggccggcgaatacatgccgcccagcttccagacacgctcgcagatgcgtcccgcgtcatccttcgtcagctgcgagttcaggccgtaggagaccggctcgggattgcccgcatcggcggcggccatgtcggcgtagaacgcctcggcctcggcctggctcacgttgtggtagtagttgctcgacgaggtgagcagcaggtcgtcgccggccttctggttgagcttcgtcggatagagcgccggatcgaagatcgcccggcagacctcgccgcgcagggagttcagggagccgaacttctcctcggggatggtctcgatcgcgtcgagcaggtagccttcggtgaattcgggcacgaacttgtcgttcgagtagtggtggtggatgccgttggcgaaccataccttcttgagatatttctccaacgccttccactcggccgtcgtgcggtcgcccttatagttctcgtaaaccgtctccagcgtgcggcgcacggggaggttcaccgggcagttctggtcgaaaagaatgtcgcggccgcatttggcagcctcggagaggtaatagatcagctccttctcttcgagcggcagggcgtcgaaaccgggaacttcgtaacggatgaccttgatgtcgtcgaaacggtcgacgatccacggcatatcgcccttggggccaccgccgcacgaggtcagtgcgggaatgatgagtgtcatagatacaatagtaaaaagctttttcatgctcgttcgaaattagtattcctacaaaagtaatgctttttctgcgattttccttctttatgtctgcgggaatttctacctttgccccgcaactcgtttcaagaaagagatgaaagtatttacaagcgtcaaggaacttcgcgccgaactggaccggacggaacagtcgggtatcggcttcgtacccacgatgggcgccctgcatgcgggccaccgctcgctcgtggagcgcgcccgcagggagaacgccacggtcgtcgtgagcgtcttcgtgaaccccacgcaattcaacgacaagaacgacctgcggcactacccccgcaccccggaggccgaccggcgcctgctggaagaggccggcgcggatttcgtgctgatgccttcggtcgaagagatatatcccgaggaagacacccggattttcgatttcgggcagatcgacaaggtgatggagggtgcgacgcgccccggacacttcaacggcgtggcgcaggtcgtcagccgcctgttcgacatcgtgcgcccggcacgcgcctacttcggggagaaggatttccagcagatcgccgtgatcaaggcgatgacggcccagttgaaactgccggtggagatcgtcgaatgccccatcgtccgcggagaggacggactggcgctctcgtcgcgcaacacgctgctcgacgaggcgcaccgcgccgcagcgccgcacatctacgccacgctgcgcgcagccgtggagaaatcgcacgaaatgacgcccgccgaactgaaggcatgggtcacggcagaagtggagcgcaacccgctgctcaaggtcatctactaccagtcggtcgacgcgctgacgatgcaggaggtcgccgcatggagcgactcggtgcgtatccagggctgcatcgccgtacaggccggggagatccgtttaattgataatatctgtatccgatcatgaaattccagattgaagtcatcaaatcgaagatccaccgcgtaacggtcacgcaggccgacctgaactacgtggggagcatcaccatcgacgaggcgctcatggaagccgccaatgtgatcgaaggcgagaaggtccagatcatggacatcaacaacggagagcgtttcgagacctacacgatcaaaggcgagcgcaacagcggctgcgtgtgcctgaacggcgccgcggcacgcaaggtgcaggtgggcgacgtgatcatcatcgcatcctacgcgctgatggatttcgaggacgccaagcagttccgcccgtggatcgttttccccgacacggcgaccaaccggctcgtgaaataacgcgccccggcgcggcagcaggccgacccgacacaaaatctccccgaaaaaggaggttttttcgtttaatccgttatctttgcagaagataacccctgcggcggccgcgcgccccggccggtccggacgaatccgcccggctcaccggatagttccgccgccgcagggccaagcacttttcgatggacataaccctctccatagccgctttcgcgctctcgatactgggcatcatcggctgcatcgtaccggccctgccgggcgtggcgttgagctacgccggacttctctgcgcctggttcacctcctactcccagatgacctccggggcgatctggctgtggctcgccgtgaccgtcgccgtgagcgccgccgactatttcctgcccgcatggatgacgcggcgcttcggcggatcgcgctcgggagccatcggggccacggcaggcgtcttcgccgggttcttcctctttccgcccgtggggatcatcctcggcccgttcgcgggcgccgtgctgggcgaactgctcaacgaccggagcgacgttccgaaggctttcctcgtgggattcgggtcgttcctcgcattcgtcgtcggcacgggcgtcaagctggccgcctcggcaggcatgctgatccatgtcgcggccgacacctaccccgctctccgggactggttcgcaaccactttctaaaacatatcgcatatgaaaaggtttctactactaacggcggtcatcctcgcgatgctcgcttcggcttgcagcaaatacaagtacgaaacggtgtcgggcgatccgctgaaaacccggatttacacgcttcccaacggactgaaggtctatatgagcgtcatgaaggagcagccccgcatccaaacggccatcgccgtgcgggtcggcggcaagaacgaccccgccgagacgaccggtctggcacactacttcgaacacctgatgttcaagggaaccgaaaagttcggaacgtccgactacgccgccgagaaacccatgctcgacgagatcgaacggctcttcgaggtctaccgcaagaccacggacgaagccgagcgcgcggcgatctaccaccgcatcgactcgatcagctacgaggcttcgaagatcgccattcccaacgaatacgacaaactgatggccgccatcggcgccaacgggaccaacgccttcacgtcgcaggacatgaccgtttacgtcgaggacatcccttcgaaccagatcgacaactgggctaaaatccaggccgaccgattccttaatcccgtgatccgtggcttccacaccgaactggagaccatctacgaagagaaaaacatgtcgctgacgcaggacggccgcaaaatctgggaggcgatggacgccgcgctcttccccaaccatccctacggcacgcagaccgtgctgggaacgcaggagagcctcaagaacccgtcgatcaccaacgtcaagaactaccacaagacctactacgtgcccaacaacatggccgtctgcgtctcgggcgacttcgatcccgaccagatgatcgcaacgatcgacaagtacttcggcggcatgcagcccaaccccgacctgccgaaactggaattcaagcccgaagagccgatcaccgcgcccgtggtgaaggaggtctatggccccgaggccgcgcgcgtcatgctgggctggcggctgccggccgcaacggacccctcgaacgacgtggcggacatcgtaggttcggtcctctacaacgggcaggcaggcctgattgacctcgacctgaaccagcagcagaaggtgctctcggcctatgcctacgcctctgcgcagcccgactacggaacgttcctcatggccggcagccccaaagccgggcagtcgttggacgaagtgcgcgacctgctgttggccgaagcagcaaagattcgcgccggagagttcgacgaagggttgatcaaggcttcgatcaacaactacaagatgcagctgatgaacgagttcgacaaatacgaccagcgcgccatgttctacgtctactcgttcatctacggcaaggagtgggccgacgacatccgccaactggaacgcatggaaaagatcaccaagcaggatgtggtggactgggccaacaaatacctcggtcccgaaagttacgccatcgtctacaaacgcgaaggcaaggaccccggtgagcagaagatcgcagccccgaaaatcacgcccatcgccaccaaccgcgacgcgcagagcgtattcctgaccgaaatccagaacacggaggtgaaacccatcgaaccggtgttcgtggattacaagaaggacatgtcgcagttcgaggcccgcaagggaatcgacgtactttataagaaaaacgagtcgaacgacatcttcacactgacctatgtgttcgacacgggcacggagaacgatccggcgctcaatctggcgttcgactacctgggctacctcggttccgagtcgctgacggccgagcagatcgcctcgaagatgtacggcatcgcctgctcgttctcaatgcaggccggccccacctcgtgccgcatctcgattacgggactgggagaaaatatggccgaagccatggaaatcgtcgagggactgctgaacgggcccaagcccgacgaggcgattctcgccaacctcaaagccgacatgatcaagagccgcgctgacgccaaacttaaccagggccgctgcttcggcgccctgcaaacctacgtgttctacggtcccgacttcatccgccgcacgacgctcaccaacccggcgctcgaagcgatgagttccgaaatgttgttggcaaagattggcgaactgatgggcaaacagcacgaagtgctctactacggcccgcagtcggagaaagaggtgacggaggcgctggccatgcaccacaaaacgtctgcggagcttcagccgctcgaaaagaagcacctgcaactgctgcccacggacgaaagcaaagtgctgatggcccaatacgacgccaagcagctctactacctgcaatatgcaaacctcggcaaacagttcgacgtcgcggccgaccccgaaatcacgctctacaacgagtatttcggcggcggcatgaactcggtcgtcttccaggagatgcgcgaggcacgcggcctggcctacaccgcgcaggccagcatcatgcagccgaactacgccgacacgaagtacggctacatggctttcatcgccacgcagaacgacaagatgcagatggcgatcgaagctttcgacgagatcatcaacaacatgcccgaatcggagactgcgttcaaaatcgccaaagagggactgatctcgcgcctgcgcaccgaccgcacggtgaaggaacaggtgctgtggagtttcatcggactgcgcaacctgggccttgaggaggaccgcgacaagcagattttcgaaaaggtgcaggcgatgacgctcgccgacgtgaaggccgcgcaggagaagtgggtcaagaaccgcaaatacgtctacggcatcctgggcgacatccaggatctcgacctcaactacctcaagacgctcggtccgatccggaccgtctcgcaggaggagatattcgggtattaaaccggcaaaagatgttccaaaaagccctttcctttcggaaagggcttttttcaggcaatccggacaaagaggaggcgcagcgcgctccccttccggaatcagagataagtcgtaacgccgtccccgctttcgatgtcggcgagcgatcccgaagcatcggcggccagcttccggcagacagccgaacggccgcgatagtaaccgccctgcgtaaaactgccgccgaagaaaacgaactccccggcatcgttgccgccgtcgggaaagaggaacgtattggttccctgcccgaagaagggctgaccgacgcccgacaggaggttcttcgtgctgtaaagatcgttgtcgggaatccggtagccgtaaccggccgggttgtagacgtccgtggtaatggtggcgccgtagaagaccgcgtcgcacgggacactcttttcgtcgacctccgtacccttgaaaacagcgatgccgtcggcgatatttttattgccgttgctgttgtagttgtgaaggaatccggtggtcttgtcgccgatgccgtcggccccggcctgcgtattgtagtcgacactgcaaatccagttggcgccgctgatgtccgcactcgaattgccgttgagccgcttgttgacaccgccgacatagaagaatgtacccttggccgcacggcccgaggtgaggttgaacttgtaggtaacgtaactgccctgcacccagcccttggcgttgaccttgttgttgcggcaggcgataacgcagtagggcgtctgcgcaaagtcgatctcctcgagggccatgaactgaatgtattcgttgttcgtgtcgctacccttggcgtcggccagcatgcccgtaatgacgatggcgctgcggaactccttggccaaaggctcgaccgtcataatgatgggcgcctcatcgccggaatccaggcggaacgaatggaaacagtcgctggccgtaccggggaagtagctgaacgcagcgcggtactccccccgggtgcttcccttgaaatggatgcagccgttctcgtcggtggtgtgccggtgggagtagagttctccgtcgtcgccgatgaagttgagcgtgagcggctcgttggcacgcggggcgtcggtcttggcgtccatcacctgaagcgtgcgcggcaggaaccaggcgccgtcgttgtcgtcgtcgctgcacgaacctgccagcaggcaggccgtgagcagcaacaggatattctggaatttcatggaatcgtcatttacttgttatacttgatagatacgtggcccagccggttcgtggcgttgggcacgaccgacgacttgccgtcggttccggtcaggctggcgcagcgcagacgaatgctgaccgacgccttgtcctgcaaagcggcgggcagggcgaagtcgaagaccttgaagccgggcatgtaatgaggcagcgcatttttcgagtcgcactggccgatgacggtatagctgccgcccggaacggccgtccacgacgtaccgtcggtcgaatattcgactacgaaatcgcgcggtccggtagccagcagcgaattggtctcgatctgcaacgacagctgcgaacggattcccgaggtcgagacgttgctgataagccagtaggtgtccgtatcccacagcgccgaatacataccgccgcccttgaccgtattggccgtaccctgaccgttcgagtcgacgtcgccgcgcggcttgttgccgaaataaatgcggccgctgccggcgaggaaggcgttgtagaaaccgtcggcattgctcttgtagagcgaggcggacgccgggccggtcgtcggggcgacgtgggtcacgccctccttgaatccggcgggtttgacacaggtccactcgacgagcaccttgctgaagctgttctcgcgcgaagggtcgagggcgatctccgcctgggtgaggtgacggatctggaaagcgcccatctccccgaaattggagttgtactcgcgggtcaggatgcccgtgacggttcccgaacccatcggcagcgaatgacggcggtaatccacgccgaaattggtcaacatgtacagatggtcgccgttgatatcgcgcaggcacgtgctgtagtacttggtgagattcttgccgtagacattgacgccgccgccggatacatagtactcgtcgtagttgacaagaccgccgtaaggcatcgcgatctccacgtcgcgcagccggaccagcgagaaaagcatctcgtcggtcagatctcggatgtaaacctcgcggggctgtacgggcgaaccggcctctttctgcatgatatgttcggcggcgatacccgtgaaaactttataggtgaacgtcccttcggcaacctccttcacggtgctgcccagcagccagagccttacacggtcgttgcgggcgacgcccaggtcgatcgtcgactcgaagagcagcgcacggccttcggcgtcctgaatcgaataacgccgattcgggaagttggcattgcgtccgtcgagcacgatctgccccgtgacgtagacgttttcctccacgtcgccggtcccgagggctgccgcaaaggcgaagtccttttccgtggcggcagagggattcatgctgaaagactgggtgatacgtacggccgcttcggtcgtgcggccgaactcatcctgatagaggagcgaaatcaccgcgatgcgccgttcagacgagccgttctccccggcgtcgaatgcgagttttccgtcggcgagggtcaggttttcgatccatgccccgccttcctcgtccccgtagctgaccgagaggtcgatgcccgaatcgacggacgtttcaacggcgatttcgtggtgtgctgccgtggcggaaatcggcagggcttcggtttcgagacggatatacgactcgacgggcatttgcgaaaggatgaacgagtcgctggcgtcgcccgagagcgtcgtggccgtaatgacggccgtacgcttctcggtcatcgaggtattctccgagtaggtgatgatcaccgaggcgcttttggcgcccttcgtcaggttgagtgtgaaccagtccgcgtcgctgtggagtttccacgacgtgtccgaacgcaggatgaaagaggcggtgctgctctcggggccgatgacgacctcgggcttgtcgaaatgcagcgtggaggtctcgtcgtcgtccgaacagccgcagaagagcgccgcggcgctcaacacgaccgccgtacgggcgataaaccgcttgatgaagtatgtgttcattgttcagtttcttttaggcatggatatacgttatttggcaaaggaccactcgatgaccaccggaaaatggtccgaagggtacttctgcgaatacgaggtgttgacaatcgcccacgactgcaccttcgtccggcccttggtcacgaaaatatggtcgatgcgcgaagccttggccggaggtgtggagatatacttgtaaccgttgtaggagggccagtcggcgttgaccttatcggtcgtacgggcatagctgtccaccagcgtcccggaggtaacgatcgtgttgtagacgttggtctgctggttcgagttgaagtcaccggtgcagaaggccggggtctttccggcgatctccgcgaccttctcgatcagcagcttggcgctctcggcccgggcgacggttccgatatggtcgaaatgcgagttgaagaggaagaactccttgcccgtggccttcacgcggaaatgcgcccaattgcacatgcgcggggaataggagtcggagaatttcgtattgggaacgttgggcgtctccgaataccagaacgaaccgctttcgagcacttcgaatttgtcggtcttgtagaatatcggattgaaatgacggcgctccacattgtcttcgcccgtcacgctcgtgccgatccaggtgtatccgggaagggcggcggccatatcctcgatctggaacttgtagggttcctgcgcaccgaagatgtcgaaatcctcggcttcgagcagccggcagacgatctccttgcggttctcccagcgtccggcctcctcgttgcggttgtcatactggatgttgtagctcgccacgcggatgggttcgagccattccagctgtgtgccgccgttgccgccgccgtcgtcgtccgaactgcacgagagggccgaggagctgaacagcagaagtccgcaaaaaagggtcgatttcagaagtcggttcgtaatatggaaagtattcatggtgttttgcttttatcagtttttatatcggaacgggaacggagcggggttgaagagcggatcggaaccctgcaacagccacatccgtgaattgcggtcgtcgcccttgtccagacgcttgatcgcctcggaaacctgcgcattgttgttgtcgatctccgactgcggatagcggtagcgcagaggcaggtagccgtcgttgtaaatctggtcggtgttgtgcgtcaggtaggccgagaaatcgggatagcccgtacggcgcagttcgaaataggcctcgttgccgccctgcatgaagaaattgaggtatttttccgtgatgatcttacccagtttttcggtgtcgctgcccttgaactgcaccttttcgtgccccaggtaggcccgggtgtcggcagaactcacccccaggaactcatgcgcagcgcggatgccgttcaggtaatgggtctccggatcgtcgtcggtccagccccgcagggcggcttcggcgaggatgaattcctgctcgggatagccgatgttcatggccgaaggaccgaccggctccagataccatttcgacttcaggcgcgactgcgacccgtcttccatgtcggtattgttgttgtcgcccgtagcgccgggattgggaatgacgcccttgtaattcgcaaggtccgtgggatcggcattcttgccgtccagcttgatcatcatttcggccagtttcggcagacgcatgtccccgcgctcccgcatccagtcgacgacgaacttggagatccggtacgacgaaacgaaattgttgtcgttgtaatacttgtaattctccatattgcccttttcgtcgcggatggcgctgtcggacaacgtccccatgatcgggttgccctccggatcgccgacgatgccggcgaacagttcgccgacacgctccccggcgatggtctgcttcatcgagcagttgatcaggatgcgcaggcggtaaagattgatcagctgacgccacttgcgaatgtcgccgccgaagatcacatcgccgtcgattttggtattgtcgtagtcccccagagcctcgttggccgctgcaagctcccgcagcaacccggccacgatctcctcctggggatcgtatttgggcgaaaagttcgggtcgtcgaagcgtccctgcgcagcctcggtgtaaggcacgtcgccgaacagtcgggtggtgtcgaaaatccagctggcacggaaatatgccgcaaggtggatgtaacggggatcgttgaggcgttcggcttcgcggaccatgtcgtagcaccaggtcacacggcggtattcgctgatgaaattgcggcgctggaagttgaaatggccgccgccaccgcgctgatcccactgccaggccagccgatagggctgcacaccgtagtattcgatgccgaaagtcgtgatgcagagctgtgtgaggatggttttcggatgcacctgcgtcggcttgttcacgtcctggctcacctcgtccatggtcaggtcgcaggaaacgaacaccaacggcaggacgaaaaatatcgagagaaagcgtttcatattcatatccgtattagagtttgagggtaagattgaagccgatcatgcgttcggtcggataggagaaattcttgtaagccgcatcggggtcttcgttgtcgagcttcttccagatgagcaggttggtgccgataacgaagagttcgagccccttgaaaatccggctgccggagagcaaatccgaaaaatcgtagccgacggacatcgtgcggagtttgatgaaatcgcccttgaaaaggttgtaacccatcgtgtagggaccgttgagcttacccatgtagccgatccagcttttgaaatagacgggcgtagtcgaaggggcgtagccgcgcgtatcgtagagcacgttgccgtgatcgtcatactcgatgtcgccgtcgaccaccaccacggcgttcgaagggatgtacgacggagttttcgtccagtccagctcccgctcgggagcggccgtgagcttgtgggtcccggcttcgatcatacgggcgttgaggtctgaacggatgacaccgccgacacggcccgcgatgtcgaacgacaggctccagttgcggtaacgcagcgtcgacgagatgccgaactcccaatcggcgccggcatagccgatcacacgcttgaaggggtcttcgatgggacgcccgttgttctcgaaaacgatgaaattgccctgcggatcacgctgccagacgctctcgtagagcgcatcggcacggtcgcccaccttgaggttgttgtagttataggccccgttgtaaatcttgtcgaggtacttacgggtctggaaccagttgaagctgatgtcccatttccaatccttggttttgatcggcgtggccccgaccatcagttcgtatccttcgcggcggtagtcgttgccgttggtgagcatctcctcgtagccgctcgactggttgatgtcgaccttctggatctggccctcgtcgtaggtgcggtaatagctgaagtcgaaacgcaggcggctgccgaaaaagcgcaggtccgtgccgacctcgaacgaactcgtgaaatagggtttgatattgggatcgatgatcgtggtcggaggcgtgaacgcggcattgccgtcccagtaggtattgaacgaataggtgtcctgcaacatgtagacggtcgactggtcgaacccgaccttggcccacgaggcgcggactttccagaaggaaacagccttcggaagcttgaccgcctcggtgatcagtgcgctgaacgccaccgacggatagaaaaaggagcggttgttcttgttgagcgtcgacgaccagtcgttgcggccggtgaacgaaaggtagaatgcatcgcggtaacccagcgtgacggacccgtaagcgccggccatgcggcggcgttcgatcttcgaagtggtcgacggggtgttctgcgagttggaaaggttgtagagatcgggctgctggagtccgccctcggtcgtcgaaaagaggtaattgcgctggtagttgaagagcgaaacacccagcatggcgtcgaggtcgaactccccgaaccgtttcttgtacgagagcatggcgtcgaggttgacgtcgacgcggcggtcgctgccgaccgaatagagaccgcggtcgttgcccacccaggcgtaaggtttgcactcctcctggttctggtgtttggagtcggtggcggccttgaccatgaaattgaggtcgtcggtgatgtcgtagtccagcgacgccgaagcgatcagctcgggttcgctgtaaggacgcgtgtactcctcggccacaaaccagggattgttgaaccacacgtggttccagttacgctgggcgtagccttcctgcccctcctcccagtaattgcgcagatcgcggatgtcgttgttggcgcccatatacaccagaatgttgtaatacggatgcgaattgccgtaaccggaccagggacggtttttggaataggtatagttgtagatcatgctggcattgatatgcagcttcctggtgatgttgtagttggccgccatattgacgccgaagcgcttgagatcggtgttgggagtctgcccccggcggtagagctggttgaggctgatgcggaacgacccctccttgaatttatgggagatgctgacgttgttgctcgtggtgaggccctgttgcagaaaattgcggaaattgtccttgtgggagacgaaaggcgtcggaatccgcttccccgtcttggggtcgatcgggctgttgtactgtacggtctcgaaataaccgctcggcgtggtggggtctttctggtcgagtttcgggccccaggtccacagaccgtcgtatacgccgccgcccttgccgtcgaggtaggaatactggccgaaatcgcccgtaccgtagatgctctgctgctcgggcagggtgaggtacccggcggtgaacatcgtcgaggagttgagcgtgatctcggtcttctcgccgatgtcgtcgcctgtcttggtagtaatcaggatcgcaccgttggcgccgcgcgaaccgtaaagcacggccgcctgcggacctttcaggaccgtgatcgattcgatgtcgtccgacgaaacgccgcggtaataggtcacgggcgttccgttgatgacgtagatcggggtctcgccacgcagcttgatcggaggatcttccagaatgccggcgcgggtattgaccgtaagtccggcaaccttgccgttcagggcgttgatcggattatcggtcttcaccttgtcgaaagcgtcggagttgacctgctggagcgaatatcccaggctcttctcggctttcttgatgccgagggccgtgaccacgaccgtttccagcgaaatgtccgacggttcgagacggatgtccacacgggtctgcacgccgacatgcgtccgctgggtcttgtagccgatataactgaacgagacggacgccccgaccgggacgctgatgcggtagttgccgtcggcatcggtgacgcatccgttggtggttccctcctggatgatggtgacgccgacgaacggcatgcccttttcatcggtaacacgccccgtcagggccaccggccgggaatcggtgcgggggggggtccggcagaccgcgctgcggactgtccgatgatgacatggcggcccttgacggtataggtcagcgaagtgcgcgccaatgccagatccatcacctcctggatcgaggcgtcggcgaccttcaccgaaacacggatgtccgccacatcctggtccttgtaattgaacagatagtcgctggaggcttctacctgacggaaaagctgcacgagcgtcacctcctgtcgggtatccacggtgattttccgttcctgggcgtgaacgaccgtcgtgcccagcaacagcatgcacacgaccgcacggcgcaggacggtgcgcaagcagcgtgtcttctgaaaaaatgcgttggtaaagtttggtttcattgtttccgggttggaagtttaaaggtattggtacgttgccgcgatcggggcatcggaccgaagcagaacggcatccgttcgggcggaagccgcaaaaatcggaaaggcgaagacagggatcttgtcagttcataggcatcggaaaatttaggagttcggtattatcgggttggattttcagcgtttggcaacgaaatagacattgtcgagtttgctccactccatgccggtctggcggctcacgatgtcgagcgcctgctcgacggacagccgtgtttcgagcgcacctgaaaagcgggtccggccgacgtctcccgcatcggtgatgatgcggacgtcgtaacgcgcggagagttgttcgaggacctcctccagagtgagcgatttgtagcggaacagattgtccttccaggcggtcgtgatctcgggatcgaattcgctgacggtgatttcgccgctcccgacatgataaacggcccggcgcgaaggcgtcaaccgcagattctgatttccggcgcggaacgcgaccgacccttcgaccagcgaagcgctgacaatgccctcttcagtccggttgctggcatcgaaagtcgtgcccagcacggagacctgcacatcgcccatctcgacaacgaatcgtttgtccggcatcttctcgacttcgaaaaagcccttgccgacaagccgcacgttccgctcgtccctgccgaaatcaccgtcgtactccaaacggctctccttatcgagggtaatgcggctgccatcgggcagctcgaacgacgaaatgctgctgcccgtgatgaaggcgaacctttcggcagcacggggaccggacagcgcccatccgcagaacagtcccacggccagcatggcggccatcgacgcataacgccccatacgagtggcgagcaggcgcagcatgccgctcctgcgcgattcggagccggcagcgatccgccgctgcaatttccggaactcccgctccgggtcaatgctgcgggtcgtcgtcacgcgggcgttccaatagctcctgatccgagcgtattcctcttcatgcgcgggatcggcggcccgccaggcggcgagggcttcgcgttcaccggccgggcaaacctccgtgagatcacggacaagccgggcgttgagttccttttccgaaagggtgcgtatgtctgtttttgatttcatgtcttatggattaagtaccggaaacggcggaatgttcttaacggatcagcaaatatttttcttgcgcagagcctcgcggatcttctgcacggcatggcccaggtgcacttcaagggttttgacggagatatagagcgtctcggccgcttcgcggtgcgacatccggtcctcgcgcaccagtttgaaggccagcttgcatttgggcggcagcgactcgatggcacggtttatctcgcggacggtctcggcggaaatgcagtcgtcctcgggagtcgtgctggtgcgggcgaaaaggtccagcggcatttcgtccagattgacggtgggcaggttgcgtttccggagataattcaatgccttgaatttggcgatccggtagatataagcattgaaattccggatttcgggaagttcaagacggttctcccagaccgcgaagaacacatcggaagtcagttccataacagccccgtcatagcggacatacaatccgatataacgggctatacgcttgtaataaagcatataaagttcctgcaaagcctcctgggaagcattgcaggccaggtcgtcgaggatgtaacgtatgtcggtcgggtccatgctttctattgattaagtaccctaaaatcgcaaaagttcttaatcggagaggtgtttttatgcgaataacgggaaacaatccggaaaaaccgccctgctgacagggcttcgggagaagaatgcgaacgcagtccggcccggaggagcatatgttccatccgggccggacaaacgaaagaggcaagcccctgaaatcaataacggtagtgctcggccttgtagggaccgtcctccggaacgccgatgtagtcggcctgacgccgggtcaggcgggtcagttcgacgccgaggttgtccaggtgcaggcgcgccacctcctcgtcgaggtgtttcggcaggcggtagacgccgaccgcgtgctccttctgccacagctccatctgcgcgaggcactgattggtgaaggagttcgacatcacgaacgaaggatggcccgtggcgcagccgaggttcaccagacggccttcggccagaatgaagatcgaatggccgtcggggaaagtgaacttgtcgacctgcggcttgatgttcaacttcacggccccggacgtttcgaggcgcgccatctggatttcgttgtcgaaatggccgatgttgcagacgatggcctggtcgcgcatccgctccatgtgctccagcgtgatgatgtcgcagttgcccgtgcaggtgacatagatgttgccctcggcgagcgcactctcgacggtcttcacctcgaagccctccatggcggcctgcaaggcgcagatggggtcgatttccgtgacgatcacccgggcgccgtaggagcgcatcgagcgggcgcagcccttgcccacgtcgccgtagccgcacacgacgaccaccttgccggcgatcatcacgtccgtggcgcgcttgatgccgtcggccagcgactcacggcagccgtagaggttgtcgaacttcgacttggtgcacgaatcgttgacgttgatggccggaaccaggagttcgccggcctcctgcatctggtagaggcggtgtacgcccgtggtggtctcctcgctcacgcccttccattcggcgaccgtgcggtgccatttttcggggtcctcggccaaaatgcttttcagcgtgccgaggatcacctcctcttcgtaggacgaaggttcgtaatcgagcgtcgaggcgtcgttctcggccttgtaacccttgtggatcagcagcgtggcgtcgccgccgtcgtcgacgatcaactgcgggcctttgccgccgggaaacgaaagggccatggcggtgcaccaccagtattcgggcagcgtctcgcccttccacgcgaagaccgggacgcctgcggcggcaatcgcggcggccgcatggtcctgcgtcgagaagatgttgcacgagcaccagcgcacgtcggcgcccagctccacgagagtctcgatcagaacggccgtctggatggtcatgtgcagcgaacccatcacgcgtacgcctttcagcggcttttcgggtccgtatttgcggcgcacggccatcaggccgggcatttcatgctcggaaatctcgatctccttgcggccccattcggccagcgacatgtcggcaaccttatagggaagagtgttgtcaatatacatagcagtatgttttttaagttatcgcatcgttcgtccgtatctgcccggttgagacccgcggcgtaccgccgcgtttacaagtctgaccccacaccaaacccctccctcgggaggggcttgtcgcaacgcaaccgggtttttgaccaaaatacggacacattatttcaatcctaaaatatattccttgtccctggcaatctgcccgcgcagttcctccaccgaagcgaaccggcgttcgtcgcggatcttttcgagcagttcgacccgcagccgacggccgtaaagttcgccgcggaagtcgaaaatatgcgtctccaaacgccgctcgacacccccgaccgaagggttgcggcccaggttcgacatggcgtcatagactttcccgccgacctccgcacgcgaacggtagaccccgtcggcagcggcgacgtcctccggaacggccagattggccgtcggaaaacccaactcacgtccgagtcggcgtccgtgctccacaacgccttcgatcagaatccgttccatcagattttttcggtcagtttacgcaccagccggaactgcgagaagaactccttggcaaagacacgcagtaccgtataggaaggtatcgccagcagcatgcccaggattccggccagcgacccggcaatgagaatcaccaggaagatttcgagcggatgcgccttcactcgttcggaatagagcgtcggctggaggatgaaatcgtccatgcccttgaggatcagcagcgacccggcgatcacgaaagccgtatgccccacgctcatgccctcgatcggcgagacgatgcccacgaaaaccgagaccacgccgccgatcagcggcccggcgtaaggcacgacgttcatcacacccatgataaggccgatgaaccccgcgtcggcggccttcatcccgaaggccatcatcaccagcgtcacggcgatcgtgagcagcaggctttccgaaaggatacccgtaaagtagcgcgccagcaggaccgtcaccgaatccagcgcacgggtgatgttgccgtgataatgttccgggaaaacggaggtgaccatcgcgtagaacaggccctcctccttgaggaagaagaaggtgatgaacgaaacggagaaaatggcgatcaccgacgaaagcacgaggttgatgaccgacgagaaaatcgtgttgagcgaattgatgtcgatgatctgccggagggcggccgtcagttcgtcggagagcgagaaagtgctctcgggcagggagaaaagcgcctgcaaatcgtgctgcatccgggcgatcggctcgccgatgctccccacgaccgccgcgaagtcgacgtgcgcgaactggtttatcttgttgaagaccagcggcacgaacaacgaacacagcgtagccaggacaacccagatcaccacgagggtcgccagcgcggccagccagcggggaacctgccagcccttgaagtgaagccccgaaagaaacttcacgagcggattgcccatgacggccagcacggccgaaacgaggatgtagacgacgatcgaggagaaataccagaccagaaagagcacggccgcggcaaccgccgcgcccgcgatgaaccgcaggaaggtctggggcgtcgccttcatggcgttattcgttttcgaggttcttgcgcagccgggcgatcggagtctgcgaacccaccgtgggatcgccgatctccaccagcagttcgctgtccttggggacgagcacgtcgacgcgcgagccgaacttgatgaatccgcagacgctgttctgctcgacctgatgaccgacggtcatatacgagatgatgcgccgggcgatcagtcccgcgatctggcggaagagcaccttttggcccgagggcatccgcaccacggtcgtcgtgcgttcgttctcggtcgaggatttggggtgccaggccaccaggaaacgccccggatggtatttgaaatactccacctcgccgcccacggggacccagttcatgtggacgttcgtaatggacatgaagatcgaaatctgcaacatctcctccttgaggtactcgtcctcggagacgacctccgtcacgaccacgcggccgtcgcagggagcgaagaccagatcggcgtcgtggatgcgcacccggcggggttcgcggaagaaggctacgatgaagaaccagaacagcagcagcacgagggtgctgaaccacagcagcgagacgttcgcatcgtggaccagcaaatggtaaaacagccaccacagaagcaggcagacagcgcccgagatgccgatgattttgtatccttccttattgattctcataacacggttaagtttgcagttacatcacaaaaagcatatagacgaagacgaacggcgccgagagcagcatggcgtcgaagcggtccagcactccgccgtgaccgggaatcaacgttcccgaatccttgaccccggcggcgcgcttgaacatcgactccaccaggtcgcccagaacccccgtagcggccgcgacgagcgccagcccggcccacacccaacagctgccgtccatcacgcgggcggcgacgagtcccaggacaacggccccggcgatgccgccgaagaacccttcccacgacttcttgggcgaaaggcgttcgcacaggcggtgcctgccgacggacatgcccaccagataggcgaaaacgtcattggcccagatgatgaaaacgtagaaaatcatcatccagggactccacgtctcgctgccgatgatcggaatgtaacacatcagcgagaacggcagcgccacgtagacgacgcccatgaaagtgatgccgatattggcggcgggattctcccgacggcggtaaagttcgcagatgaacatggcgggcagcagcaacagcagaagggccattccgcaggcgaaagcctgccgggcgctgccgagtatctggatgtcgtccgacacgaatgcgaaattcagggcgaaaagcacgagtcccgcagccagtccgacgatccgctggggattgctgccctgctccccggccagggaatagaactccgtcatgccgacgaccagcaacgccgccagcagcaggccgaaactccattgcgaccatgcgatagcccccagcatcaccacggcgaggacagccccgctcacagtgcgcacccagaggttcttcattttttcactcattgttttttaagggtgtagttgggtttcaacggggtcattcggtttcgggcgcggcaacggccggagctacgggagccggttcggccgtttcggacttatccgatttggccgaaggatcggcgaccgcggcggcctgcttgccggcctgcggctcctctccggcgggtttgccgccctcggccctggctttcgcctcggcctcgcggcgttcgcgttcgatgtccttcttgcggcgaccgaagatgcgctcgacgtcctcggtgaagaccacctcgcgggagagcagcagttcggccagctctttcagaccgtcggcatgttcgcggagcaccttctcggccatcttgtaggccttctcgatcacctgcttggcctcggcgtcgatctgctgggccgtcagttccgaatagggcttcgtgaaggccatgtcgctctggcccgtggagtcgtagaaggagagcgtaccgacgttctcgctcatgccgtagtaggccaccatggcataagcctgcttggtgacgcgctccaggtcgttgagtgccccggtcgaaatctcgccgaaggtcagctgctcggaaacgcggcctccgagcgtagcggccagttcgtccatcatctgctcgcgcgtggtgatctgacgctcctcgggcagataccaggcggcgcccagcgccttgccgcgcgggatgatcgtcaccttgatcagcgggctggcatgctccagaatccagctcaccgtggcgtgtcccgcctcgtggaaggcgatcacgcgcttctcctcgtcggtgatgatcttgttcttgcgctccaggccgcccacgatgcggtcgatggcggcgaggaagtcctctttcgaaatgaatttcttgttgtggcgcgcggcgatcagcgcggcctcgttgcagacgttggcgatgtcggcgcccgagaaaccgggggtctggcgcgccaggaacgaacggtccagctgcggatcgagcttcagcggacgcaggtggacgttgaaaatctcctcgcgctccttcacgtcgggaagtcccacctcgatctggcggtcgaaacgcccggcgcgcatcagcgccttgtcgaggatgtcggcccggttggtggcggccaaaacgatgacgcccgtattggtctggaagccgtccatctccgtcagaagctggttcagcgtattttcgcgctcgtcgttgcccgagaatccggcgttcttgccgcgggcgcggccgatggcgtcgatctcgtcgatgaagacgatgcagggagccttctgcttggcctgctcgaacaggtcgcggacacgcgaggcgcccacgccgacgaacatctcgacgaaatcggaacccgaaatcgagaggaacggcacgttggcctcccctgcgacggccttggccagcagggtcttgcccgttcccggagggcctacgagcagcgcgcccttcggaatcttggcgcccagctccttgtatttgtcggccttcttgaggaaatcgacgatctccatgatctcgaccttcgcctcctccaggccagccacatccttgaacgtcacgcgcttggagttgtccttgtcgaagacctgcgccttggctttgccgacgttcataatgccaccgccgcctccggcgcccgcgccgcgcgacatggagcgcatgatgaagaaccacgctccgatgatcaccacccacggcagcaggttgatcagaatcgaggtccagtcgttggccttgttttcatagatcaccggaacggtctgccccgacttctcctcggcggccttcaaatcctcgcgaaacgaatctaccgaaccgatggtgaaagtcagctgcacgcccgactcgggcaggcggcggaaacgcttgtccacctgatcgttacggtacttctcgccggcctcctttttcaggaacacctgcgcctggtcgcggttcacgacctggatcttctccacgtcgcccttctcgaccatctcctgcacggtggtccagtcgctgggcagcggcgcttcattgctgccgtcgaacagataccagccgatgatgaacaaaccgatcaggccgtagatccacagcatcgaaggccgcggcatgttcatattcattttattgttgttcttgcttttctgtgccataatccggattactcttcgtattcatatttcaccagcggtgcgtcggcccacagctcctcgagcttgtagaagctccgaagctcggtctggaaaatgtgcaccacgacgtccacatagtccatggcgacccacacgccgttctgctggccttcgatgcgccacaccttctcgcccaatttctcgaacaccttctcctcgatttcggcggctatggcgcacacctgcgtcgtggaatcggcgttgcagaccacgaaatgcgaacagatcgctccatcgaatcccgagaggtccaacgatacaatattcttaccttttttatcttcaatcgcgctgacgatcgtttcgatcagtttatccataaatgttcaataggtatctataaccttgcaaaggtatgaaaagagaatgagatttgaaagcaacgcggtaaaaatcgcgccgcaagcgggcatattgttccggaagcgattcattatttcgccctttttgtcgccggattcgttttttatcactacttttggagatactccaactaacccaagttcaatttatgcgaaaaatcttcatgttctgtctgaccggcgcactcgcactggccacgacgtcctgcaaggacgaaaaagtaaccaccatgcagacgatcaccgtcaatggtcagatctgcgaggtcaaaagcgctttctatgtggaagaaaaagccgacgagcaatgggaaacctcatacgacctcattctattcagagagtatttttcaacattaccgtttacaatgtccgactacggtgtcgatatagaagtttctgaatccctgataggcaaaactatcgacctcacagaacccgttacccaaaccgggcctctcagaccatacctctccgtcggggcaatcggtgaaacagagttcgacatcgtacactcgtttgaaagaattacggtaagcaatggagacgacatctcttcggcaacagtctcctacggaatgctcactgtcaccagagacggggataatttctccgtcaaactctccgtcaaactttccgacggcaaatcaatcttcgccgactggacgggaaaagcgaccaaagtaacgattccggaataaccgaccggataatcgacatgcgcccggcctgcgttttgcaggccgggcgcattctttcagagagcggaagctatgccttcgcacccggaacattggccagaatggtctcggtcaaggcccggatgatcgagttcttgacgtaggtgcggcgcacggcgacggcgatcttgcgcgaggtagcccctttcgaaagggttttcagccggtcgcggcggtccgaggggatgtattcgacggccatttcgggaatgatcgtcagacacgacgtgcagtcgacgatccgcatgagcgtatccagcgaacccgattcgaacgaatagtgcgacggcatcgaacgccgggcctggcagagttcgatgatctggtcgcgcatgcagttgccggggctcaagatcaccaggtccttgaggtcgatctcctcgatacggatattctgccgctcatagagcggattttcgggcgacacgtaagcgtagaagcggtcgttgaaaagctcctgctcgaggatgccctcgccgcaggtgccgctggcgaccagcgccgcgtcgatacggtcgcgcttgagcgcctcgacgatgtccgaagtgatcatctcggatatttccagctcgaccttcgggtagtcgcgcacgaaggccggaatgaatttgtgcagcaggtagggcgcgatggtcgggatgacgcccagccgcagtttgcccgcggtttcgcccttgagctccgaaacggcctccttgatgtaattgtacgccttgatcgtctcgcgcgcctgttccagcaccacctcgcccgcctcggtgggaatgacgggctttttcgaacggtccagaagcaccacgccaagctcctcttcaagcgccttaacctgcatgctcaaagaaggttgcgtcacaaaacaatgttcggccgcaagcgagaaactcccgcagttggccacggccagcagatattcgagttggatgattgtcataacaggcgtctatttgagaaagcgaagatataaaaaaaatctatatcggacaactttttcgcattgccgcatagtttttcgtatcttcgcctgcaaaatgtactttctctaaaaatatggcaaaaatcatccttaccggcgaccgtcccacgggccggctccacctgggccacttcgtgggttcgctccgccgccgcgtcgagctgcagaactcgggcgagttcgacgaaatattcattatgatcgccgatgcgcaggcgctcaccgacaatgccgacaacccggaaaaggtgcgtcagaatatcatcgaagtggcgctggactacctctcggtgggtctcgaccccgcgaaatcgacgctcttcatccagtcgcaggtgacggaactgtgcgaactggcgttctactacatgaacctggtcaccgtgcagcgtttgcagcgcaacccgaccgtgaaggccgagatcgccctgcgcggattcgccgagggcgccgccgaaggcgacacgacccagcgtcagggcattcccgtcggattcttcacctaccccatcagccaggcgtcggacatcacggccttcagggccacgaccgtgcccgtgggcgaggaccaggagccgatgatcgagcagacgcgcgaaatcgtccacaaattcaacgcggtgtacggcgaaacgctcgtcgagccggaaatcctgctgcccgagaacgcggcctgcatgcgcctgccgggaaccgacggcaaggccaagatgtccaagtcgctgaataactgcatctacctgtcggacacggccgaggaggtcaagaagaaggtgatgggcatgtataccgaccccgaccacctgcgcgtggaggacccgggcaaggtcgaaggcaacacagtgttcacctacctcgacgctttcagccgccccgagcatttttcgaaatatttgcccgaatacgcttcgctcgacgagctgaaggcccactaccgccggggcgggctgggcgacgtgaaggtgaaacgcctgctgatcgccattctcaacgagatgctcgacccgatccgcgaacgccgccgccactacgagacgcgtatcggcgaggtgtacgacattctccgcgaaggctcggccaaggcccgcgcagcggccgccgaaaccctggcggatgtccgtgcggccatgaaaatcaactatttcgacgaccgcgagctgatcgacggccagaccgagcatttcaagttgaaaacggaaaattaaaaattgaaaatcaaaggcatttgacttgcacaccgggcatcgtacaggatgaaatcaaaccgcccggtctcggtcaatcgcaatgtttcacttttaacttttaactttttatgtccttccgcgccgaccgcatctacctcgagttcctccggctgacccggagactctccaaccagcagattatgatgctgctggccgtggtggtcggtgtgctcgcagggctgggagcctacctgttcgaaatgctgctgcacggcatcaagagcgggctgatacgctggttcccggtggacagcgcacatatcctcttcctgatctaccccgccgtgggcatcatcctggcgacgctgttcgtcaaatacatcgtccgcgacaacatctccgaaggcgtgacgcgcgtcctctacgccatgtcgcgccgcaattcgcgcatcgcccggcacaactgctggacctcgatcgtgggcggtgcgacgaccatcggattcggcggttcggtgggacccgaggccccgatcgtgctcacgggagcggccatcggctcgaacatcggacggctggcgcgcctcaactacaaacacacgacgctgctgctgtgctgcggcgcgggcgccgccctcgcggcgatcttcaaagccccgatcacgggcgtggtcttcgtgctggaaatcctgatgctcgacatcaccgccgggtcggtcatcccgctgctgatcgcctcgatcaccgcgacgacgatggccttcatgctgcgcggcttcgacccgattctggccgtgacgctggcccccgcggacgccttcgagctgtggcagataccgctgttcatcctgctcggcgtgctgtgcgggctgatggcgtggtatttcacgtcgatgaactcgcgggtcggaggtttcttcaagagcatcgacaaacagtacaagaaatggctgtggggcggtgcgattctgggtatcctgatcttcgtcttcccgccgctgtacggcgagggttacgagggattcacctccctgatgcacggcaacgcgcaggagctgttcaacaactcgctcttctaccgcttccgcgacatcgactgggtgatcatcctcttcgtcatcgccacgatgttcttcaaggtcatcgccatgtcgacgaccaacgccgcgggaggcgtgggcggtacgttcgcgccgtcgctgttcgtcggagccttcacgggcgcctcgctggcgctggtgtgcaacacgctgttcggatgggaggtgtcgatcgtctcgtttacgctggtcggcatggcgggcgtcatgtcgggggtgatgaacgccccgctgacctcgatcttcctgatcgcagaactctcgaacggctacggactgttcatcccgctgatgatcaccgcctgcatctcgttcgccgtggactactaccttgaccccgactcgatctacaccaagcagttgcgccagaagggcgaactgctgacccacgacaaggaccagtcggtgttcgtcttcctgaaactcgaagagctgatggaaaccgatttcctgcgcatcaaggagaacatgaccctgggcgacatcgtgcacatcatttcgacggcccgccgcaacatcttccccgtgatcgacaacttcggccggctgatcggcgtggtgcagctggacgacctgcgcgaggacatgttcaaacacgagaagtacgggcacccgatctcggactacatgattccgccgccggacaagatcatcgaacacgaggcgattttgagcgtcatggagaaattcgaggacaagcacgcctggatgctgcccgtcgtggacaagcaaggccgctacctgggattcatctccaagtcgcgcattctgaacgcataccgcgaacaactcgtaaaaatacagcaatgacaacggaaaatgcccttccctgggccgaagaggccgactgcgccgtcacggtgtgcgacaccgaaggcgtgatcctctacatgaacgaaaaggcgcgtgcgaccttcgcccaacacggcgacctgatcggccggaacctgttcgactgccacaacgaacggtcgcgcgaaacgatccgccgcatgctcgcatcgggaggcacgaacgcctacaccatcgaaaagcagggcgtgcgcaagatgatctaccagacggcgtggagggagcgcggcgaaatccgcgggctggtggaaatctcgatggagctgccggacgaaatgccgcactacataaggaaataaatagacgaggggaggttttttgaaaaccttccctcgttttacggaaacggtccgaaaccggtggcattgctacaacttgatgtcgtaaatctgaatcactccggtcagcttgccggcggcgtccgtcacgagcagcgaggtgaccttgttgcgggtcatcatcttctcggcctcgatcagtttctcgtccggcgagatggtcttgggattgcgcgtggcgatgtcggaagccctgatattgaagaactccccgcgcaggcgctccatcgcgcggcgcacgtcgccgtcggtgacgatgccctcgatccgctcgccctcgcagatcacgatcagccccaatccgcccttcgaaatggcgtggatcatctccgcagccgggcagtcaggcgccacgacgggcagatcgtggtcgcgcatgacgttccctacggtcatcagcagacgccgcccgaggcttccgcccgggtgcaggcgcgcgaaatcgacgctcgtgaaaccccgcatctgcatcagcgacacggccagcgcgtcgcccatggcgatctgcgccgtggtcgacgaagtgggtgcgagatgcaggatgcaagcctcctccttcacccccacgtcgagatgcacgtcggagttcttggccagcgccgagtcggggtttccggtcatcgaaaccagcttgttgccgttggagtggatgaaggggacgatcttgaggatttcgtccgtctcgcccgaataggagagcgcgaccacgatgtcctccttcgaaatcatgcccaggtcgccgtggaaggcttcgccggggtggagaaagaagctcggggttccggtcgaagcgagcgtcgcggcgatcttgcgccccacgaggcccgacttgcccatgcccgtaacgatacacttgccgcggcttccgaggatcatctccacggccgtggcaaactcgtcgccgagagtgtcttccatgcgtttgagcgacagcatttcggtatggatcgccttgcgggcaacctccagaatctgcgccttggtcgtatctgtcatgcttaacgagagttagatgggtattttacagcaggcttttcacaagggtctccagatcgtcgagccgcagcatgttggccgcatcgctcaaccccttgtcgggatcgggatgcacttcgaaaaagaaaccgttggccccgaacgccttggccgcatgcgccatggcgggcacgaattcgcggttgccgcccgtcttgccgcccgccgcgccagggcgctgcaccgagtgggtgcagtccatcacgaccgtaggggcgattttgagcatgtcggggatattgcggaaatcgacgacgaggttgttgtagccgaacgagttgccgcgctcggtcagccagatgtcaccggcccccgcctcgcgggccttttcgtaggggtagcgcatgtccgcgcccgaaaggaactgggcctttttgacattcaccgttttgccggtccgggctgcggcgaccaccagatcggtctggcggcagaggaacgccggaatctggatcacgtcgacgacctcgccgacgggtgcggcctgccacgattcgtggatgtcggtgagcagacgcagtccccacttcgcccgcacgtccgaaagcatctgcaaccccttttcgagtcccgggccgcggaacgacgatatggaagtgcggttggccttgtcgaacgaggccttgaagatgatttccgtgccgagggtgcggttgatggccgcaagcctttcgcccacggcgtccagcagttcggccgattcaatgacgcacggacctgcgataaattttattgccataaaattcgaattaaaaattaaaaattaaagattaagaattccggagaattttcaatccctaatttttcattcttcatttttaatttttaattggagaaagcgttccgctttctccagatcctcgggcgtgtcgatgccgatggtctcgacctccgaaatccccacgccgatcttgtaaccgttctccagccagcgcagctgttcaagcgattcggccagctcaagcggcgactgcggcaacgccgtcaccgcccgcagcacgtcggcgcgaaaggcgtaaagcccgatatgcttgtagaacgtgtggcgcgcgagccactcttcgcgcggaacgccccgcaggtagggaatcaccgagcgggaaaaatagatggcccgcgactgcgcgtcgaggaccaccttgggcgagttgggattttcgagggccgccagtccgtcggcctccgtaaagggtttcacgagcgtggcgatgtcggtcgcgggatcgtcgaaacagcgtttcacggcctccagctgcgagggacggataaaaggttcgtcgccctgcacgttgaccaccacgtcgtattcgcggccctgcttgcagtaggcttcccaacagcggtcggtgccgctccggtggtccggggaggtcatttcgacccgtcccccgaaggcccgcacggcgtcgcggatgcgctcgtcgtcggtggccaccacggcatcgtccagcacgccggcgacctgctcgtagacccgctggatgacgggcttgccgcccagccgcgccagcggcttcccgggaaagcgcgtcgaagcgtagcgcgcggggatgattgccaaaaaattcataattcagaattcaaaattcataattacagcctcccgttttttcgtcagggcggatgaaatccgggacttcgtgaaaccggcaaggcagaagcatacacggggtatgtggctgccgaagccgacgaaggaagcgccagagttcgccgccatcacgaaaaaactattccagagccagctgcaacacctcctcgttggtcttcacgtaatggaacgtgaggcccgcgatatattcgggtttgatctcggcgatgtccttgcggttctcctccgagaggatcagctcggtgatgccggcgcgtttggcggccaggatcttctccttcacgccgcccacgggcatcacccgtccgcggagcgtggtctcgcccgtcatggcgatacgctccttcaccttgcgccccgtatagctcgacacgatcgaagtgaccatcgtgatgccggccgaaggaccgtccttcgggatcgcgccctcgggaacgtggatgttgatgtcgttcgtttcgaacagcttggggtcgatgcccaactccttgtagtgggccatcgtccactcgtgggcgatcgtcgccgactccttcatcacatcgcccaggttgcccgtgaggctcaccttgcccttgccgggcgtcagcaccgactcgatgtagaggatgtcgccgccgacctcggtccacgcaaggcccgtcacgacgcccgtcatgccgcccacttcgtactcctccttgaggaacttgggcatgccgaggattttctcgacgtccttcatcgaaatctcgggcgcgaaagcctcgtcgaaagcgatctgtttggcgcgggcgcgggcgatcttcgccagattcttgtccagcgaacgcacgccggcttcgcgcgtatagcaggcgatgacgttctcgacgacctccggggtcatcgtcatctcctgctccttgatgccgtgggcctcgcgctgcttgggcagcaggtggtccagcgcgatgcgcaccttctcctccaggaggtaaccggcgatgttgatcatctccatgcggtcgcgcagcgccggggcgatattggccacgttgttggccgtggcgatgaacagcaccttcgacaggtcgtactccatgtcgaggtagttgtcgtggaacgtggtgttctgctccggatcgagcacctccagcagggcgctcgacgggtcgccgtggttcgaaacggtcaccttgtccacctcgtcaaggatgatgacggggttcgacgagccgcaccgcttgatggtctggatgatccggcccggcatggcgccgatgtaggtgcggcggtgtccgcgaatctccgactcgtcgtgcaggccgcccagcgaaatacggccgaacttgcggcccagcgccgcggccaccgacttacccagcgaggtcttacccacgcccggagggccgtagaggcagaggatcggcgatttgaggtcgcccttgagcttgatgacggccaggtgctccagcagccgctccttcacctcgtccagaccgaaatggtcgtgatcgagctgttcgcgggcgcacttgaggtcgaggttgtccttcgtcacgtcgttccacggcagttccagcagcagctgcaggtaggtcatctgcaccgaatattcggccacggcgggattcagccgctcgaccttctgcaactccttctcgaaggtttcgcccacctccgcgggccagttcttcttcttggcctcctcgcgcatcttctcgatgtcggcatcggcgccgtcgcccagttcgtcctggatcgtacgcatctgctgctggaggtagtagtcgcgctgctgcttgtcgatctcctgcttgacgcgctcctgaatctggttcttcagctcggccagctgctgctcgcggatcaggatttcgagcagcttgcgggcgcgggccagcaggccgggggcctccagcagcgactggcggtcttcgtccgtcagctccatgttggagcagatgaagttgatgataccgcgcttcgagtcgatgttcttgatggcgaaagccgcctccttgggcatcgacggcgacacgttgatgatgttcagcgccacgtcgcggatcgagtccacgagagcctcgaactcgatgctcttcacatcgggagtcgaatcgcgcagggccgtcacccgggccttgaaataaggctcggtggtgatgtactccgtgatctcgaccttctccagaccgttcaggatcaccgtgaggttgccgttgggcatttcgaggatcttgatgatccgcgcggccgtgccgaccttgtacatgtcgtccggcgcggggtcctcgacgtcgctttcgcgctgcaacacggcgcccagaataccgccttcggcattcacggcgcgcacgaggttgatgctcttgtcgcggcccaccgtgatgggcgtgatggcgccggggaaaagcaccgacgaacgcagcgtgagaatgggtatgatttcgggcacttcgacctcctccacaggctcgtcgccgccggtcacgatggggatcacgcggtgattgccgtcgagcagctcggggacgagattcacgtcgtctacttcgatggttttgatcttatcttttttgctcataggatatacagatatataatggtgcaaatataacgattttttagaaattttattttatctttgacagaatgttaataactttgcatccctgaaaacaaagtaaaattcaacgcgccatgcaaatcgcagacaaatacgcaccgcagcagatcgaatccaaatggtacgactactggatcgaacagcatattttccactcggaacccgaccagcgggaaccctacacgatcgtcatccctccccccaacgtgacgggcatgctccacatggggcacatgctcaacaacacgttgcaggacgtgctggtgcgccgcgcccgcatgtcgggaaagaacgcctgctgggtgccgggcatggaccacgcgtcgatcgccaccgaagccaaggtggtggcgatgctgcgcgaaaagggcatcgaaaagtcgtcgctcacgcgcgaggagttcctccgccacgcctgggaatggaaggagaaatacggcggcgtgattctcaaacagctgcgcaaactgggcgcctcgtgcgactgggaccgcacgtgcttcacgatggacgaagcccgcacggagagcgttctgcgcgtcttctgcgacctctacgagaaaggcaagatctaccgcggcgtaaggatggtcaactgggaccccgcggcgcagacggccctctcggacgaggaggtggtcttcaaggagtcgcacggcaagctctactacctgcgctacaaggtcgagggaaccaaccgggcgatcatcgtcgccacgacgcgccccgagaccattctgggcgatacggcgctgtgcgtcaaccccaatgacgagcgttacaaggccctgcccgccgacgcccgcgtcgtcgtgccgctggtgggacggtcgatccccgtgatccgcgacgaatacgtcgacatcgagttcggaacgggcgccctgaaggtgactccggcccacgacgtgaacgactacatgctgggcgagaaatacgggctggagaccatcgacatcttcaacgacgacggcacgatcaacgacaaggtgggcatgtacgtgggtcaggaccgcttcgacgtgcgccggcagatcgaaaaggacctcgacgcggcgggccttttggaaaagaccgaagattacaccaacaacgtgggctattcggagcgcacgggcgtggccatcgagccgaaactctcgatgcagtggttcctctcgatgcaggagctggccgaaccggcgacgaaggccgtgatggaggacgcgatccgtttcgtgcccgagaaatacaagaacacctaccgccactggatggagaacatcaaggactggtgcatctcgcgccagctgtggtggggccagcgcattccggcgtactatcttcccaaaggcggcttcgtggtggccctgacgaccgaagaggcgctggaaaaagcccgcgcgaagagcggcgacgcatcgctgcaactgacggacctgcgacaggacgaggacgtgctggacacgtggttctcgtcgtggctgtggcccatctcggtattcgacggcatccgcttcccggacaacagggagatcggctactactaccccaccaacgatctggtgaccggtcccgacatcatcttcttctgggtggcccgcatgatcatggccggctacgaataccgccacgaaaagcccttctcgaacgtctacttcacgggtatcgtgcgcgacaagatcggccgcaagatgtccaagcagctgggcaactcgcccgatccgctggacctgattgcccaatacggcgccgacggcgtgcgtatggccatgctcatttcgtcgtcggccggcaacgacgtgatgttcgacgaggcgctgtgcgagcagggccgcaacttcggcaacaaaatctggaacgcctaccgcctcctgaacggctgggcggtggacgccgcagcggcgcaaagcgagaacaaccgtctggccgtggcgtggttcgggcaggcgttgggccgctcgctgcgccagatcgccgaggatttcaagtcataccgcatctcggaggccttcaaggaggcttaccgcctcttctgggacgatttcagcggcttgtacctcgagatggcgaagcccgcctacggacagcccatcgacgccccgacgatggaggcgacgaagggctatttcgacgccctgatgcgcgtgctgcaccccttcatgccgttcgtcacggaagagatctggcaggacctcgcgccccgcgccgaaggcgcttcgatctgcgtggcgcagatgcccgagcctgcggccgaagacgccgcgatgctggcgcgcttcgaactggcgaaggagatcatcacctcggtgcgcaacatccgcaaccagaagagcctgccgcagaaagaggcgctgacgctccgggtcatcgccgatgagaactatcccgcggagttcgcccccgtcgtgatgaagatggccaacctcacggccatcgagaccgtggcggagaaggacccggcggccgcggcgttcatcgtcaagacgacgcagtacttcgtgccgatggccggaaagatcgacgccgaggccgagcgcaaaaaactcgcggacgatctggcctactacgagggattcctcgcctcggtgatgaagaagctctcgaacgagcggttcgtcgcctcggcgcccgagaaggtggtggccaacgagcgcgccaagcaggccgacgccgaagccaagatcacggcgatccgcgaacagttggcggcgctcgaatccggcaaataagcattaaaacagctatcatggccctacgatacaaactcctcctgtcatgctgcgccctgaccatgacggcagcctgtgcctatgcccggggattcagactggagggaaggattgagggactgcaagccggagacaccctccgtttcgagcgtattctcctgccttcatggaagtacggcccgggattcgacgtcgtggtccgcaaaccgggcgcattccgctatcgggggaagtcggaacacgaccagtactacctgatgacctaccgcccgaaagccggaagagccgcagccggggatcgcggaggcaaacccgtcatcgtcaggcccggcgataggatcggcatgaccggctcgacggatgcgatctattattgccgtctcggcggaggaatttacgacgagcccatgctgtcgagcctgctggcggtcgatgattcgctcggccgggtccggggacgttatctggaagcggccaatccgcacggaagcctgtacctgttgatcgacaggatacccaagttgtcgtacaccccagccaaggaggcgcacaagttttacaagacattgtccgaagggttgaaaacgagctatttcggccagatgtacgcagactgcatggcaagaatggaacaactcgccgaaggaaaaccggcgccggatttcacactggcaacgaccgaagaccgtactgtcgccaaggctgatttcaaaggccgatacctgctgctctaccattggggattgtgtcccggctcgatccatatcgaccggcaggtgagcgatctgttcgaaaagtacaaggacaaagggttgcaggtggtgggtctgaccgaatccatcgccgatatccggagcgtatacgaaagtctgcccgcaggcaaaaaaacgccgtcgccgggtgtggacgacatgcgccccgtgctggccggcatgctggaacacggatggatcgaagcggaactggaaaccggtcatccggaaaaccggcagatcatggaaacgtatgccatcgaaggctggccgttcttcgttctgatcgatccggacggcaccatactggcacgcaattacacgaatgccttttaccaggcgaaaaagattctggacaaggaactgggcggaacggccgccgaatgaaccgcgaaacggccggcggcgggacggcaggcgcaagccccggaaaaccggaccggaacatcccgtcataaactctatgtttgatctctaatctacgaatattttgtctccgatcaccatctacaccgacggctcggccctcggaaaccccgggccgggcggctacggcgcagtgcttctctcgggacaccaccgcaaggagctgtcgcagggattccgcctcacgaccaacaaccgcatggagctgatggccgtgtgcgtggcgctcgaaacgctcaagttcgagggttcggacgtggtcatctactccgattcgaaatacgtcgtcgacgccgtttcgaaaggctgggtcttcggctgggtccgcaagggattcgcgggcaagaaaaaccccgatctctggatgcgtttcctgcgcgtgtacaaccgccacaacgtccgtttcgtctgggtcaagggccacgccgaaacagtcgagaacaaccgctgcgactgtttggccgtggcggcggccaacgacaaggcgcactggctcgaagacacgggctacgatcccgcagagcggtaaaaaggaaggccgccgcaccgttttttcggcacaaagtccaccataatccatcgaattatcgtacatttttcgcttttcgggttattattcctatctttacgccgctaattgcgtaaccaacaaacatacgctccgaatgttcaaaacatacatgcggctgttgggttttgcccggccgatcaagaaatacgcgatcccctacttcttctactcgcttttctacgcgttgttcaactcgctgacgttcatgctgatcatcccgatcctgaacaccatgttcgacgcgaactactccttcgaatacgtcgaaaagctgcctcccctggaactcaatcaggactacctcgcaacacttttcaacttcgcctattcgcacatcttcgaacaatacgaccgccagaacgtactgatgctgctggccattgtagccatctgcatcagcctgatgagcaacctgttccgctacctcggcgcatggaccatggagaacatgcgcacgcggaccctgcaacgcatgcgcaacgaaatgttctcgcgcgtgatggacatgaacgtgggctatttctcggaccagcgcaagggcgacatcatttcgaaaatcacctccgacgtgggcgtggtgcagttctgcatcaccaacaccctccaggtgtcgttccgcgaaccgtttctgatcatcggctacatcgtgatgatggtggccatttcgtgggagctggccatcttctcggtgctgttcctcccggtggtggccctgctgatcggcagcatcgtgaagaaactccgccacccggcccgcaccaaccagcagcgcatgggcgagatggtctcgacgctcgacgagtcgctctcgggcatcaaggtcatcaagagctataacgccacggaatatatcaagcagaaatactacgccatcagcgccgacctggcgcgcctgaccctctcgatggcccgccggcagcagctggcctcgccgatgagcgagttcctcggcatcacggccgtgggcgtgatcctcgtcttcggcggttcgctcgtggccaaaggcgtgctcgaccccggcggattcatcgccttcatcgccatcttctcgcagatcacgcgccccgtgcgcaccttcatcgaccagttcgccaacatcaaccagggaatcgccgccggagagcgcatcttctcgatcatcgacacgaaacccgaaatacaggacaaacccggcgcccgggaactcacggggctgaaagagaaaatcgaattccgcgacgtgcacttcacctacgacggggagcgcgaagtgatcgacggcatttcgttcgagatacgccgcgggcagaccgtggctctggtcggtccctcgggaggcggcaagtcgacattgagcgagttgctgccccgcttctacgacccctcggcgggcgaaatactcatcgacggcatctcgctgcgcgactacacgcaggagagcgtgcgcgcccatatgagcgtcgtggcgcaggacaccgtgcttttcaacgacaccatcgaaaacaacatcggcatgggcaagcgcggcgccacgcacgaagaggtggtcgaggcggcgaaggtcgccaacgccgactgcttcatccgcgaatgcaccgacggttacgggaccaacatcggcgaccggggcgtgaaactctccggcggccagcgccagcggctctcgatcgcccgcgcggtgctcaagaaccccgacatcctgatcctcgacgaggccacctcggcactcgacaccgagagcgaaaaactcgtgcaggacgccctcaacaacctgctcaaaggccgtacgtcggtggtcatcgcccaccgcctgtcgaccatccacaacgccgacctgatcgttgtcgtcgaccacggccgcatcgccgaacagggcacgcacaacgagctgatggaacgcaacggcatctacgccaagctgatcgaaatgcaatccttcgactaaaatgaccgagcgggaaaagatgctcgccggcgggtggttcgacccccgggatgcggaactcaccgccatccgggacaacgccacgcgcctgatgcaccgcctcaacgtcgaactctgcggccacgacgacgcctaccgcgccgcgctgcgcgagctgtgccccggctgcgaaggattcatccgcgaaccgttccgctgcgattacggactcaacatctcaatcggcgaagggtcgttcgtcaatttcgactgcgtgttcctcgacctggcaccgatccgcatcggccgccacacgctcataggtcccaaagtgcagctgctcaccgccctgcatccgttcgacgcgacacagcgccgcactggactcgaagcgggccgtccgatcaccgtcggcgacgactgctggctgggcggaggggtgatcgtctgcccgggcgtcgccatcggcgaccgttcggtcatcggcgccggagccgtcgtgacgcgcgacatcccggccgactcggtggccgtgggaaatccggcgcgcgtgatccgcacgctgacgcggcaggacgaaaccgaatagcgccgccgcgcaaaaaatcatccggacaaaattcgttttctcccgaaattttctatttttgcagaaacatcgaaaaaagggtaatttctgccatgcactccgaacaagccgcccccgacctgctgcaaaaatcactcgacgcctccggcgtcggatggtggcagctcgacttcggacagcgcgaaatgacctgttcgcggctggcggcggaccttttcggcgcagatcgcacccgcatttcgttcgaggaggtctacctgctgcccggcgaggagcaccgggcgcgcatttacacccgctgcgccgccctcaaggtctccgactcgctcgacgaaacgttcgtcacggccaacggcgacagatgcctgcaagtcagagccgtggctgccgccaacgatccgctgacgggcgtccgctcggttttcggaaccgtccgccgcgttacggaaggcactcccgaaaatgccgaactggcctccatcaatcagagttacaaggcgacgcaacgcaattacagccacctcgcacaactgatcgaacacctgccgatcggctacctgcgcgtcaacatcctgcgcgacaaatcgggcgaagcggtcgactacctgctttcgtacatcaaccagcaggccggcaggatactgggcatccacacgcagggccatgccggaaagacggcccgcgaggtgggaatagatcccctgaaacacattcccacattcgagcacatcccctcctgctccttctgggagcagaccgggaaaagcccggacggcaaacgcacctgccgctgcctgatctacaacacgccgggcgacgacgacgaactggtcatcctgctcgaagacatcaccgacgccacgcgcagccgcgaacagctggacgatttcgagcatctcttcaacctggtttcggacttcgcgcacgtgggctgcgtcagctacaacccccttacgggagagggttacaccaaggggccctgggccaaaaattacggcgaagcggaaaacacgcccgcctcacagattctcggccactggcggcaggtccatcccgacgaccggcaacaccttgaggaggagttcgaacgcctcaaaaccggagaaatccggactttcgtcaacgaagtgcgcatcgtgagcgatcaggagccgatgcgctggatcaaaatccacctgctctgccgcgactaccgtccggaggagggcgtgatcgacctggcgtgcgtcaactacgacatcagcgaactcaaacgcaccgaggaggaggagctgcgcgaagcgaagaagcgcgccgaggagtccaacaaactcaagtcggcgttcctggccaacatgagccacgaaatccgcaccccgctgaacgccatcgtcggattctcggagctgctggcagacgaaagcaggcacgaaacccgccgggagtacaccgacatcatcctgcgcaacaacaccctgctgctgcaaatcatctccgacgtgctggatctggcgcgcatcgagtcgggacgcacggacatcgagcgcacgcagttcgacgcccgggacttatgccgggaggtcgccgactcgctccgcctccagcgccggccgggcgtggaactgcgcgtcgaggaagggctgccggaattccccgtcacggagtacaggaaggggcttgcccaggtgctgaacaactttacgcgcaatgcactgaaatttaccgaaaaaggatcggtaacgatcggattccgccggattcccggccacatccgtttctacgtccgcgacacgggcatcggcatcgcgcccgaagaccgggaacgcatcttcgaacgtttcgtcaaactcgacaccttcacccaagggaccgggctcgggctgtcgatctgcaagtcgatcgccgaacagctgggcggctcggtcggcgtcgactccgtggcgggcgaaggctcctgtttccggatcgacattcccgcgggggagtaatccccaaaacccgcgtccgtcccgggcgcagaaccggacgggaaacgaccgggacggtcatcgccccgaagccagacgcggacagccccgacgaagggaaggcccccgcagaccccgcttcccggaacggacatccataaatcgaacgcttcagacccgtttttcaaatcttttttatatctttgccaattgtcagaaaattagcgaagaaatttctaccgatatgaagttcaaggagtataaaggcctcgacctggcaggcatagccgccgacgtgctcggcgaatgggacgcacgcgacacgttccacaaaagcatcacgacccgcgagggccatcccacgttcgtattctacgagggtcccccctcggcaaacggcatgcccggcatccaccacgtcatggcccgcacgatcaaggacgtattctgccgctacaagacgcagcagggctacctcgtgcaccgcaaggccggatgggacactcacggactgcccgtggaactgggcgtcgagaagaagctcggcatcaccaaggaagacatcggcaagaagatctccatcgaggagtacaaccgcacgtgccgcgaggcggtgatggagttcacgggcaagtgggaggacctcacgcgcaagatgggctactgggtcaacatggacgacccgtacatcacctacgacaacaaatacatcgagacgctgtggtggctcctgaagcagctcttcgacaagggcctgctctacaagggctacaccatccagccctactcgcccgccgccggaacgggcctctcgactcacgaactgaaccagcccggctgctaccgcgacgtgaaggacacaacctgcacgtcgcagttccgcgtgatccgcgacgcgaagagcgagaaactcttcgaaggaatcgaaggtgaactctatttcctggcctggaccaccacgccgtggacgctgccttcgaacacggcgctggccgtaggccctgcgatcgaatacgtgaaggtcaagtgccgcaacccctacaccgaccggccgcagacggtcattctggccaaagagctactgggttcctacttcaccaagaagatggaaggcacatacgagatcatggaggggagctggaaaggtcccgagctggaaggcatccgctacgagcagctgatcccgtgggtgaagccggaaggcgacgccttccgcgtgatcgtcggcgactacgtgaccacctcggacggtacgggcatcgtgcacatcgccccgacgttcggcgccgacgacgaccgcgtggccaaggccgccggcatcccgccgctcttcatggtcgaccgcgcgggcaagaaccagccgatggtcgacaggcagggcaaattctttttgatcgaagacctcgacccggagttcgtgaagacgcacgtcgacgccgcgaaatacggggagtatgcgggccgctacgtgaagaacgcctacgacgagcggctgagcgagaccgacccgacgctggacatcgacatcgcggtgatgctgaaagccgaaaacaaggccttcaagatcgagaagcacacccactcctacccccactgctggcgcacggacaaacccgtgctctactacccgctcgactcgtggttcatccgcaccacggcgctgcgcgagcggatgatcgaactgaacaaaacgatccgctggaaacccgaatcgaccggaacgggccgcttcggcaagtggctcgaaggactggtggactggaacctctcgcgttcgcgcttctggggaaccccgctgcccgtatgggccacggaggactactccgaggtgaagtgcatcggttcggtcgaagagctgatggccgaaatagagcgttcgatagcggcgggcgtcatgcaggaaaacccgtacaggaatttcagggtcggcgacatgtcgaaggagaactactcgaccgagaacatcgacctgcaccgcccctatgtcgattcgatcgtgctggtctcgtcgaagggcgagccgatgaggcgcgaatcggacctgatcgacgtatggttcgactcgggcgccatgccctatgcgcaggtgcactacccgttcgagaacaaggagggcttcggccaggtctaccccgccgacttcatcgccgagggtgtcgaccagacgcgcggctggttcttcacgctgcacgccatcgcctcgatgctcttcgactcggtggctttcaagaatatcatttcgaacggtctggtgctggacaagaacggcaacaagatgtcgaaacgcctgggcaacgccgtcgatccattcgaggtgctcgacacctacggagccgacgcgacgcgctggtacatgatctccaactcgcagccgtgggacaacctcaagttcgacagggacggcgtcgacgaagtgcgccgcaaattcttcggaacgctctacaacacctactcgttcttcgccctctacgccaacgtggacggcttcacgggccgtgaagaggaggttccgatggagaagcgtcccgaaatcgaccgctggatcatctcgctcctgaatacgctggtgaagaacgttaccgaatctctcgaagactacgaccccactccggcggcccgcgccattcaggagttcgtgggcgaaaacctctcgaactggtacgtgcgcctcaaccgcaagcggttctggggaggcggcatgtcggaagacaaactggcggcctatcagacgctgtacacctgtcttgagaccgtcacgatgctcgcagcgccgttcgcaccgttcatctccgaccgcatcttcacggacctcaacgccgtgagcggccgccacaaggacgaatcggtgcatctcgcggcgttcccgacggccgacgaacggctgatcgacgcccgcctcgaagagatgatgtcgctggcgcagaaggtctcgtcgatggtgctggccctgcgccgcaaagtgtcgatcaaggtgcgccagccgctgaccaaaatcctgatcccggtgctcgaccccgcgacggcggagcatatttcggccgtgaagaacctcattatgaacgaggtcaacgtgaaggagatcgagctgatcgaaaagaccacggggctgattaccaaacgcatcaagcccaacttcaagaccctcgggccgcgttacggcaagtggatgaagcagatcgccgccctcgtcgcggagttctcgcaggaacgtatcgccgaggtggaggccgcgccggaaacggtgctcgacctcggagcggagcggatcaccgtgacgcccgccgacttcgagatcacctcggaagacatgcccggatggctcgttgcctcggagggaaaactcaccgtggcgctcgacattaccgtcaccgaggagctgaaagccgaaggtgtggcacgcgagttgataaaccgcatccagaatatccgcaaggactccggattcgaggtcacggacaagatccgcgcagagatcgaacagaagcccctggtggccgacgcaatcgcccgattcgccggttacatcgcttcgcagaccctcgccgtggaggtccgtccggcagcggaaccggcaggcgaaacggtcgtcgaaaccgacgtggacgacgaaccgctgcgcatcgccgtgacgcggatatagccccttgatatattccggtaaaatttggtaatatcggaattattgcttaattttacagtaaaccttaaaagagaggagattattatggcagacgaaagaaccagatacagcgacgccgaactcgaagagttccggcagcttatcctgaaaaagcttgagaacgcgcgtgcggactacgagctgctgcgcgccacgatcacccataccgccgacaacgatacggaagacacatcgccgacgttcaaggtgctggaggagggcgctgcaactctttccaaagaggaaagcggtcgtttggctgcccatcagatgaaatttatccgcaacctcgaaatggcgctcgtacgcatcgagaacaagacgtacggcatctgcaaaacgaccggaaagctcattcccaaggagcggctgatgaaagtgccccacgccacggaatgcatcgaggccaaagagggccgcagataaggcggggaagggatgacccccattccacgctgaacggaaaatggaaaaagacgaccttcgggccgtctttttcgtcttctccgggggagggcgtcgcggcaaagaaaagagagggatggaaaacaccgattataagccatgcggggagctgcacccgccgccgagacggaataatcgggatatgggtatcgaatcctcaatttaggcccctgtgtcgcactttttgccgaaaaaatccgttatctttgacacaatgttcgcccggttctgcatattttccctgatcctgattggggcggcaacggtcctctcggtccgtgccgcaggacccggcacgcacgcccccgaccggttcacgcccgacagcgcccgcgtggcgaatcccgatgcatcggcgcgcaaccagcgcctctacgacagcatccagtcgaaaaccagccggcgcgccgtgccgcgcatgctttaccgaatgctcttcgtaaaacccgtgctcgacaccacgatgagcggccgcgtcaccgacgagagccgcctgctggaaccctacgccgggaaaaccatcggcgacatcaccatcgaacgccagcaggttttcgaccccggcggcaaccggctcgaacgcatggccaacaaaacccacatgctcacccgcgaccgcgtcgtccggcgcgacctgctgttccgctcgggcgacaagctcgacccgcagctcatcgtgcgcaacaagcagctgatccgctcgcgcgactacatctcggacatcgacgtcacggtgctccccgacgcggtggactcgacacgcgtgaacctcctgatcaccacgcgcgacagctggaccatctccgtcgacggaggatggcattccgagggccggacgatggtggggctttccgacgccaacatcttcggatcgggcaacaaactcaaatttatgaccaacttcagccgcaaggacttctcctacggcggcaacatggtcgaatacgaaatccccaacctgctcgggaccttctacaccgccgagatcggcggagggcgcgacttctacaactcgacgctcaacatggggctgcgcaaagagttcctcaaaccgacggactacgagataggccttacatacagcgacatcaaagccaagcgctacatgatcgaacaggacacgtcgctgctggtgaaggagcgcaacctcgacgtctggggcggctactcgcactacctgcgcgggatcaaatcgagcgtttatctctcgggacgctacaactaccggcgcgtgagccgcaggcccctcgtagccccggactacaaccccgcgctgcacgaccaggacgccctgctggtcggcgggggtctctaccgcgaaaaattctacacggccaacatgatctacggattcggtacgcgcgagtatctcgcgacgggctacaaggccgaagtgacgacgggctattcgtggggcgaattcaacgacgccctctacctcggcgcgagctacgaaacgggtggattccgcggactgggctacatcatgggcggcttcacgctcggaagctacatagacctcgaaaacggcatgtggcagcgcagcgccgtagatgtcgacctgcggtggttctccaaccttttcctgttcaagcgcagccgcatccgccagttcctcgccttcaactacacgcagggctggaaccgtgcgacgggcagcgacgagagcatccgcttcacgcgcaccgacggcctgcaagccctcaaggagtacatcatcggaaccaaccgcatgatcctcaacaccgagacggtggtattcaccccctaccagccgctgggattccgcatcgccgtcttcgggttcgccgacttcgggctgatcggctattcgcccaatatcttcaaaaacgacttcttcacctcgttcggactgggcgtgcggctgcgaaacgaacggctggtgttcaacacgatccagatccggctgggcgtggccttcggcaaacgcggactggtcgagagcgaatatttccgcctttcgaacccgacacgcatggagcagtaccgctaccgaccgacgcggcccgagatcgtcgaattcaaataggcacgcacaaaaaagcggaggattccgtggaatcccccgccttcgtgaactttttatctgcttatggtttttcctttaagcctttacctgcgggcgcggatctcgaccacgccgttgcgccccttctcgccgtaacgcttcacggcctcgtcgcccttgtagacctccatgcgcttgatcttcccggattccagccgttcaacatcctctttcgaggcctccctgccgttgatacggatcagcatgccgtcgggaaatccgcctttcagcgtcacccttcccttataaaccgacatcgaactctccggcgttccttggatcgtcaccttatcggcatgcccggcgtccgccgaaagtttaagcgacgttcccaccgctttctgcatttcggaaagctgtgccgaagtctccttgcgggccgcttcaagctccttctgggccttgtcgagcgctttctgggcctgcttccagtcatcggaactcatatacttgcgggccagtttcaacccttcgcgggcggcttcgatcccggctctcccggcttcgataccctcccgggccgacttcgcggcggctctttgcgcggcagccgcctgtttggtcgtaatcgttatcacgccctcataccccttgtcggcaaactccccggggagattcgtgcctttgatcaccgacatgctttcaatctgatccgggtcgagcgattcgatttcagacacttgtacgccgtcgacgataaatacaggattcgactcgaccgacgagccgttctcgaccttgaaccgatacgatttcgcgattccggccgtattcaccacaaccgttccgtctttcggcctcgtaccgtgaccgatcacccgcacggttgtcgactcgttcgtcccggcgctgtccgcccgggtgaccgtcacgactttgcctttcagtcccgggacctgcgccccatcgcccggttctccggtctttttgagcgttacaagaatcacgccgtcggcggccttttcgccgtacacagccatcgaaacggaatccttgagcacggtgatcgcctcgatccggtcggcagcgaggctgtccatcgacttcacctcccggccgtcgaccagaatcagcggttgttgcccatcggaaaaagatttcgacccccgaatgtaaatcgtactggtttcttttttacctttgtcttccggaaagacataagcggtttcggcgaaagcccccagggcgacggccgtgagcggcaggagcaggagcgccctggccccggcccaccgcgacgattttttacgcaacatcatggtaatacggtttttaagtttactgtgattaaagctgttggcaatcgagtaccacctcccgccggcagctttctttattaacaacatctggtaactccgggcgtcgacgccgctgtcgagcaccgcctcgtcggcttcgtattcgtggatggcccgcagttcgcggcgcagcagccacatcgcggggttgaaccattgcaggcagcccgcaacgtcggtcacgatcaaatcgagcgaatgacgcagccgcaggtgcgcccgttcgtgaagcagaatcgccccgccgttttccgccaggtccctctcggacatcacgatatagcgtccccagctgaaaggcgtcacgggccgttccgtgcgcaccagcacagccccgtcctccagccgttcgcgacgtccgccgcggatcagacgcaggactccgatgagcgaacaaagcgtccacagcagcgtggcggccgccccgagcaggaatgccgccccggcgagcatctcccacggaaaaggttcggaaagcggttcggcgaagaccgtcgcaacagcctccccgtccgggatttccggcaggacggggatttcgcggtaaaccgtgatcacgcacagcggcagcacgaacgaaaggaacatcgcccccagaaccacgatccggttgaagcggtggaaggtctcacggctcaacagcaatttgaaaaagaggtagaagacagccaggcagacgccgactttcaggctgtaaatcatcaggtcgtacatggcgctaccggttttgattttcgatgcggtcgatcaggctgcgcagttcgccgagcgagatcttctcctcctcgaccagcgccgagaccgccccgaggtaggaattctcgaaatagcggctgatcacgctgccgagcgtcgagcgcgaaaactcctcctcgctcaccaccggatagtattggtaggtgctgccgaaggagttgtgggcgacatagcctttggcttcgagcgcgcggaccatcgtcgaaagggtgttgaaatggggtttgggatcgggcgaaagggccaccagttcgcgtacgaacagcggaccgtgctcccagaagcagcgcatcagctcctcttccctgcgtgtcagtttttcaggattctctttcatatttcactcaaacaagcgttatcaggtatcgttttcagttgaaacggaggcattccagcatacggcggcgcagcaaaacgcccggtccggtcccgatgcggcgaacggcgccctcgcggccgacgatcccgccggattcgtcccacgactttccggacacgcccggccggcaatgctccctccggaacagccgcccatcgcttcatcggtcctttttcatgcacccgggagcaaaggtaactaaaaaaaattcacatgcaactattttacatagtttttaaactaaaaaatttagttatggcttttttccggaatttgaagattaatccgtatctttgaattatggtacttatagccgacagcggatcgaccaaatgcacgtggatcgccagcgacggcgcacggacgacaaacgtgcgcacgcgggggatcaacgccgtgcagcactcggccgaacagatacgcgaagccctcgcggaactgccgccatgcgacggcgtgacgagcgtgaaattctacggcgcggggtgcggcgagaccttcccggaagcgagcgagaagctgcgccgggagttgaaagcgcacttcggaacgacggacattacggtcgaatcggacctgctgggcgcggcgcgggcgctctggggccacggggagggcatcgcctgcatcctcggcacgggatcgaactcctgcctgtgccgcgacggcgaaatcctgaaaaacgtccccccgctgggctatgtgctgggcgacgagggcagcggggccgtgctggggcgcaacctggtgaacggcatcttcaaggggcacattccgctgaaagaggagtttctcgcggcgcacgggctgaattacgaggagatcatccgccgcgtctaccgcgagccttacgccaaccgctttctggcctcgttcgcacctttcatacgcacgcatatcgaccgcccggagatccgggagctggtactccggtcgttccgcgactttgcgtcccgcaacttgagccgctatccggcggaactccccgtatcgctgctgggcggcgtggcggcccacttcgaggcgttgctgcgcgaggcgctggaagcggagggccgccgcgtggaaaccatcgtagaatcgcccgccgaagggcttttgaaataccactatggaagatagaatcaccgaacaggattcggcctacgacgacctgcaacggatgtcggtgcacgacatcctgacgggcatcaaccgcgaggacgcccgtgtgcacgaagccgtgcggcggaccatccccgtcatggagctactcgtcgaacgcatcgtcgggcgcatgcagcgcggaggccggatgttttacatcggcgccgggacgagcggccggctgggggtcaccgacgcctcggagctgcccccgacctacggcgtgccgttcgaccgggtgatcgggctgatcgccggaggcgacggcgctttgcggcgggccgtggagcacgccgaagacgacaccgaaggggcctggcgcgacatggcgccctaccaccccacggccggcgatgtgctgatcggcatcgcggcatcgggaacgacgccctacgtgatcggcggactgcgcgcggcgcggcgccacggactgctgaccggctcgatcacctgcaaccccgcgtcgcccgtagctgccgaagcggagtatgcgctcgaagcggtcgtaggaccggagttcgtgaccggatcgacgcgcatgaaggccggaacggcccagaaattgatgctcaacatgttatcgacagccgtgatgatccgcctggggcgtgtcgagggcaaccgcatggtcaacatgcagctgaccaacgacaagctcgtggcccgcggaacgcggatggtcgccgaagcgtcggggcttgacgaaaccgaggcccgcaaactgctgctgcgctggggttcggtgaagcgggcattggaggagatcggaaaatagacaaaacgaatacacacttcgacgtacaaatcgctttcgaccgccgtcattgccgcctgcggagccatctacaagcatggccccgctccggcctccctccggaagggagacgacgcatgctcccggcagttgaaacgataaagcatatgaccgcataaacagaacaatggctaaacttttttccgaccgcgaaatacgcgccattgcggtattcctgccgttggccgggctgctgatcatagccctgatgctcgtacgcccggcagccgaccccgaagcggcccgccgcgccgaggccgagatggaggaggcgttgcccgcggacagcgtcgtgatgtcgcatttcgaccccaacacggcctcgttcgacgacctgcggcgactcgggcttacgaagcacgaagcggtgagcctgctgaaataccgcgccgcgggcaaagtgttccgcattcccgaggacctgacgctctgctacggcatcagcgactcgctctaccggcggctcgaaccctgggtgcgcatcggccgcaaatacgccatcgcacccgaaaaataccgcacggggcgcattctccccgaaccgctcgcacccgggccgttccgcatcgacaccgtgagcgcccgctacctgcgcgccatcggggccttgtcgaagcgtcaggccgaggcgttcatccgctggcgggatttgagcggcatctacgacatggaggacctgcgcgaatgctacgtcgtgagcgactcggtggccgcggcgctggaaccctacgtcatcttcccggaacggaaggcgcggccgatcgaacagcccgtggagctgaacacggccgattcggcgacgctgcgctcggttgtgggcatcggtcccaggaccgtcgtggcgatcatgcactaccgcgaacggctcggcggattcgtccgcgcggagcaactcgcagaggttccgggagtgcgggaacgcaattatgaaaaaattttgaaacaaatttactgcgatagttgcaaaattcggaaaattgatattaactttgcaagtccgaaagtgctggggaaacacccctacatagcaccgcaggcattacgaaaattgctgaaagcaagacagttgaaaggaggttggagtaccgctggagaattggtggaacagaacatattgacccgcgaggaggcagcacggctggctccttatctgcaattcgggtcggacagcggacctgccgacgaataaaacgaccgtttttggggaagatgcatcgaggatgcgcaccccgcagttttcagaacgaacaaacagattcaaaacaacaaaaaacaaagaatattatgattatcatgccggtaaaagagggcgaaaacatcgagcgcgccctgaaaaagttcaaacgtaaatacgagcgcacgggcgtcctgaaggagcttcgccgccgccagtacttcaccaagccttcgatcgcgaagcgcgaggcgatgcagcacgccatttacgtggaacacatgtaccgcgacgacgaataatttccgcaagatatgaaaccagaaccgggaacactccgaaaggaatgttcccggtttttctatgccgtaatcagcccgatcagcgcaggaacaacagttcgcgatacttcggcagcggccagatctgatcgtcgacgatctcttccagcttgtcgatatggcggcggatctcgtcgaagcagacagccacggtatcgtggtaggcaatggccttttcacgcgggtcctcgatccggttggcaaccttgcgggcgtcgatcatctcgccggtgagtttctggatcgaggccgtatggtcctgaatcttcttgataagcagaatgtccgacgaggcgttcagccctccgatctgatgcatcttatagaccttgtcgagcaactgcgcctcgtatttcgaagcgatcggcacgatgtggttcatcgccaggtcgcccagcacgcggccttcgatctggattttcttggtataggtctcccacttcacctcggtgcgggcttcgagttcgaccttggtgaaaacccccatatcgccgaacatcttcaggctctccctgtccaggtagcggtcgaagatcagcggcgtcgacgtctcgcagtccagaccgcgccgcttcgcctcggccttccactcgtccgaatagccgttgccgtcgaaccggatggccttgcaggccttgatcatctgcttgagcacctcgtaaatggccctctccttcttggccccggcctcgatcttggcgtccacggccttcttgaactcggtcagttcgtatgccatcgccgagttgagcacgatcatcgcctcggcgcagttgtccgacgaacccacggcgcggaactcgaagcggttgcccgtgaaggcgaacggcgaggtgcggttgcggtcggtgttgtccagcagcagcgtcgggatgtgcgaaatgccgctcatcttgaagacgttcttggcgtcgaaacggatggcatcgtcgcccttcgatgcggccagcttgtccagcacggccgacacctgcgttccgaggaaggtcgaaatgatggcgggaggcgcctcgttggcgcccagccggtgagcgttcgtcgcgctcataatcgacgccttcagcaggccgttgtgcttgtaaaccgccgaaatggcgttcaccaggaaagtgatgaactggaggttctccgaagcggtcttgcccggaccgagcaggttcacgcccgtatcggttcccagcgaccagttgttgtgcttgcccgatccgttgatccccttgaagggtttttcgtgcagcagcacgcggaactggtgacggcgggcgatcttgtccataatggtcatcagcaactggttgtggtcgttggccaggttggcctcctcgtaaaccggagccagctcgaactgactgggagccacctcgttgtggcgcgtcttgaccggaattcccaacttcaggcactcgtattcgaggtccttcataaaggccatcacacgcgtcggaatcgccccgaaatagtggtcttccaactgctggttcttggccgactcgtgtcccatgagcgtacgccccgtgagcatcaggtcgggacgcacggcccagaggctctcgtccacgaggaaatattcctgctcccagcccaggtaggaaaagaccttctcgacattcttgtcgaaatagcggcacacctccgtggcggccttgtcgatggccgtcagcgagcgcagcaggggcactttgtagtcgagcgcctcgcccgtataggcgatgaagacggtagggatacagagcgtcgtgtcgacgatgaaggcgggcgacgtggggtcccaggccgagtagccgcgggcctcgaacgtattgcggatgccgccgttggggaacgacgaggcgtcgggctcctgctgcacgagcagcttgccggagaactcctccagcacgccgccctgaccgtccggctcggcaaaggcgtcgtgtttctcggccgtaccgcccgtcaggggttgaaaccagtgggtatagtggtccgcaccgtgctccagcgcccactggcgcatacccgccgcgatgctgtcggcaacttcgcgcgtaagcggcgtgcgtttttccatcgtgtcgagcagggccgcataggtgcgcttgtcgagatacttccgcatagccgcacgtccaaataccttctttccgaagtagtccgacgagcgtccctcgggaactttcacctcgacggccgtgtgatttatggccgcatcgaccatcttgaatctgagtaatgatgacatatacctgactgattaagggtttagtgttcgtagaaaaaaccgcgcggggaaggacccgataattgcaaactaaaacctaacctgaaattcaaccggacaactgcctcccggcaggacctgccgacctaactaacccggggccgctcccccgctgcggtacatctttcgttccggctacaaatgtacgaattattccgttacgttgtttttacaaaatcaccgttttttcaaaaaacagctgtttttttcatcattttcccgaaaaaacaaccatttttcgccacacacacccgaaattttcagtcatttcccgaaaaacagcctcatttttcacgaaaaatccccaaaatgcattttcccgttttcccaaaaataagcagaaataaagaccatttttcaaccattcaaccacaccggagacagcatccgcgccgggccgtccggaaatgcggcgggcggcgaaatccggaaaaattccgccgcactgttattttcgtaacaatttcttgttacaattcggtaattaatttgtaactttacgtgcaattttgaaacagaacgaaactacacacatactaatctctaaatagtcatggcaaataccaaacgtgaaaagctgttcaccgagttcccgccggtcccgaccgaaaagtgggaagaggtgattacagccgacctgaaaggagccgattacgagcgcaagctggtgtggcgtacgggagaaggattcaacgtccgcccctactaccgcgccgaaaacctcgaaggcatccgttttctgggctcgcaggcaggcgagttcccgtacgtcagaggtacgcgcagccacaatcgctggcgcgtgcatcagaccgtcgaggtaaaatgtcccagggaggccaacgccgaggcgctgaaactcctcaactcgggcgtcgattcattgggcttctcaatcgcgaaggagggcttcacggccgaagaactcgatcagctgctcgccggaatctcgatcccggccatcgaaatggtcttctgcggcgcgcagacgggcagcatcgccgaactggtgatcgccaagctcgaaaaggaaggcactgcctccgaggcgcacgtggccttctcgatcgacccgctggtcaagggactgtcgcagaaaggcgacttctgctcgcccaacggcgaaaagtgcttcgcgaagatcgcctcgctgatcgaaaagacccgcgagtacaagcacatccgtatcgtgaccgtctcggccggcatcttctcgaacgccggatcgaccatcgtcgaggagctggcgttcgccctctcggccggtaacgattacatcgcgcgcctgaccgacgccggcgtggacgccgagctggcggcccgcaagctgcgcttctcgttctcggtcacctcgaactacttcctcgaaatcgccaagttccgcgcggcgcgcatgctgtgggccaacatcgtcaagggttacaacccctcgaagaactgcgcctgcaaaatgcacatccacgcccgcacggcagactggaaccagaccgtttacgatccctatgtcaatatgctccgcggcacgacggaggccatgtcggccaccatcgccggcgtacattcgctggaggtgacgccgttcgacgccgcgttcgaaagccccacggagttctcgaagcgcatcgcccgcaacgtcgaactgctcctgaagcacgaatcgcacttcgaccaggtggtagaccccgcaggcggctcgtactacgtggagaacctcacgcagtcgatcgccgccgaggcctggaagctcttcctcgaaatcgaggagaagggcggctacgccgaggcctacaaggccggcttcatcaaggagcgcgtggaggcttcggccgccgccaaggacaaggccatcgcaacgcgccgccagacgctgctcggcgccaaccagttccccaacttcacggaggtggccccgaaggagatcaccgccgaagccgtcacccgtcccgctgccgaaggcaacgtcctcacgccctaccgcggcgccatggccttcgaggcgatgcgcctgcacgtggaccgctcgggcaaacagcccaaggcgttcatgctcacctgcggcaacctggcgatggcccgcgcccgcgcccagttctcgtgcaacttcttcgcctgcgccggaatccgcgtgcaggacaacaccttcttcaagtcgatcgaggagggcgtgaaggccgcactcgaatcgaaagccgagatcgtggtggtctgcgcttcggacgacgattacgcagaggccgcaccgaaggtgaaggagctgctcgccggcaaagccattctcgtagtcgcaggcgctcccgcatgcgcacccgaactggaggcccaaggcatcacgaacttcatctcggtgaagtcgaacgtcctggagactctgaagttttatcttaaagaaatgggcatctgatcatgagagctaaattttcagaactgacatacgaagcaggcgggcagaagagctgctgcgcctcgaaaggctgcggacaggtggagccgtggctgacggccgagcgcatccccgtcaagggcgcctatacggccgaagacctcgaaggcatggagcacctgaactacgcggcaggcatcgccccgttcctgcgcggcccctactcgacgatgtacgtgatgcgtccgtggaccatccgtcagtacgccggattctcgaccgccgaggagtccaacgcattctaccgccgcaacctcgccgccggacagaaaggtctgtcggtggccttcgacctggcaacgcaccgcggttacgacgccgaccatccgcgcgtggtgggcgacgtgggcaaggccggcgtgtcgatctgctcggtggaggacatgaaggtgctcttcaacggcattccgctcgaccggatgtcggtgtcgatgaccatgaacggcgccgtgctgccgatcctcgccttctacatcgtgacgggcctggagcagggctgcacgctcgaccagctggccggtacgatccaaaacgacatcctcaaggagttcatggtgcgcaacacctatatatatccgcccgagttctcgatgcggatcatcgccgacatcttcgagtacacctcgaagaacatgcccaagttcaactcgatctcgatttcgggttaccacatgcaggaggcgggcgccacgaacgacatcgagctggcctacacgctggccgacggtctggagtacctgcgcgccggcgtcaacgcaggcatgtcgatcgacgccttcgcaccgcgtctgtcgttcttctgggccatcggcatgaaccacttcatggagatcgccaagatgcgcgccgcgcgtatgctgtgggccaagatcgttaaacagttcaaccccaagaaccccaagtcgctggcgctgcgcacccactcgcagacctcgggctggtcgctcaccgagcaggacccgttcaacaacgtggcccgcacggccatcgaggccatgggcgccgcgctgggacacacccagtcgctgcacaccaacgccctggacgaggcgatcgccctgccgaccgacttctcggcgcgtattgcgcgtaacacgcagatctacattcaggaggagaccaacatctgccgcgaggtcgacccgtgggcaggttcctactacatcgagacgctgaccaacgagatcgcccacaaagcctgggagcgcatcgaggaggtcgagaagctgggcggtatggccaaggccatcgagaccggcattccgaagatgcgcatcgaggaggcttcggcccgcaagcaggcccgcatcgactccggcgaggagaagatcatcggcatcaacgaataccgtctggagaaggaggccccgatcgacattcttgccgtggacaacacggccgtgcgcgagagccagatcaagcgactcaaggagctgcgcgccaaccgcgacgaagctgccgtgaagaaggcgctggccgccatcaccgagtgcgtgaagaccaagcagggcaacctgctcgaactggccgtcgaggccgccaaggtccgcgcctcgctgggcgaaatctccgatgcctgcgaagtggtcgtaggccgctacaaagctgttatccgttccatttcaggtgtttactcttcagaagtgaaaaacgacaaatccttcgagcgcgccaaggagctgtgcgccgaattcgccaagaaagagggccgtcagccgcgcgtgatgatcgccaagctcggccaggacggacacgaccgcggcgccaaggtggtcgctacgggttatgccgacatcggcttcgacgtcgacatgggtccgctgttccagactccggaggaggccgccaagcaggccgtcgaaaacgacgtgcacgtagtcggcgtatcgtcgctggccgccggccacctgacgctcgtgccgcagatcatcgccgagctgaagaagctgggccgcgaggacatcatcgtcatcgtcggcggcgtgatccccgcgcaggactacgatgaactctaccgcgacggcgccgccgccatcttcggccccggtacgccgatcgccacggcagccatcaagatcctcgaaatcctgctcgccgagtaaattcccggctccgacaagagaaacgccgcggtcgcaagaccggggcgttttttgttccggagcacttcgggagggacttttttcacccgccaaagaccggaacgggagtttttgcattatctttacgactgaaatacacaaattcattcattccaacgttccattcgcatgaagaaaaccctcattctgttgcttgcctgctgtgcctgcatccggtcgcaggcgcagactccggaggcagccgccgcaccggaaccctccgtaacccggaccgacagcaccctgacattccccgaacctgaattcatcggccaggcattggctatccggcccgacaacagaaccgagcagctcgttcaggagagcctggctccccgccaccgttcgtccaccgggcagaaactgttcggcatcggaaagaaccacatcgacgaaatgacgctgaaaggcgcgcagtcccccgtccggctccggaagagcgacggcatcgcctttatcatccgcgttccggacaacctgatcgacccgatgtcggtgatcagcgtcttccggttcaaggtcaagaagaagatgcggatcgccgaatacgcgtcggtcggaaccttcggcgaccagcagcgcaacacgctggaacggcagcccttcacctcgcgccggttcggaagcagctcctacctcatcatcttgaaaggcgtcgagaccggagaatacggcatcacggtcgatgcgctgggcagtctcaacgtttcgacattcggggtggacgaataaacccgcgttccatgacaaacaatccccgcaacctcggttgcggggattgttctttcggcagccggcaatggaatcacaggcaggcctccagaatccggcgggccatggcgccgtcgacgttctgcgcctcgccgaaccgatcgcccgcagccgtgaagcggcgttcgatctcggcgatggtctcttcgccgataccctcctccgaaaggcgtgtcgagaggcccagcgaacggaagaacgcctcgttggccgcaatcgtacggtcgatgcgctcctcctccgaaccgccggcaatgccccagatacgctcgccgtattgcagcagtttgccgcgtttctgcccgcgcagcacgcgcagcgtaccgttgatgacaatggccagcgtcgcaccgtgcgtcaagccgtgcagcgccgtcagctcgtggccgatcatgtgcgtcgcccagtcctgcgtcacgcccatacggatcatgtcgttcagggccagcgtcgccgaaagcatgtactccgacatcgtgtcgtaatcgcgctcgtccgccagcgctttgggagcgatttcgaccaccgtatgcaggatgccttcggcccagcggtccatcagccgcgactgatggggcgtagtcatatactgctccagcacatgcacgaaagtatccgcaagtccgcaggctacctgacgcttcggcagcgaatagagcgtctcgggatcgaggatcgagaagaccggataatcgccgtagaaagcatatttttccttggtctcgtagcgcgaaatgaccgccccggagttcatctcggaacccgtggccgacatggtgaggaccgtagccagcggcacggtcttgccggcctgccccttgagcacgatgtcccatgcatcgccgtcgtagagaaggcccgcagcgatgagtttcgtaccgtcgatgaccgacccgccgccgacagccagcaagaagtccaccttccgctctttgcccagcgcaatggcttcgcgcagggtctcgaccgacggattcgcctcgatgccccagaactcgaccagatcgcggccttcgagtgcggcgacgacctgatcgtagacaccgttacgcttgacgcttccgccgccgaaggtcagcatgatgcgttttccggcgggaatgagcttcggcagacgggcgatctggcccttgccgaaaaccagtttggtaggattgtgatagatgaagttgttcatggcgaatatttatttatcctattacgaagacaataaatgaccggacggctccgaaaccggattgcacctggtttgacagggcctccggctgctaaaagagccgttacgcctctaaagatacgaaaaaagccggactgcgcagagaattctccgctaattttcaatctttgcggtaagagctgccggttttttaaacgaagcagagcgcggatgggtgtaccggagtacgtcccattcgcgccctgcgggagcaagtgcaaagatgcaccgtaaaatcaatcgtttagaagtacttgccgcgcaggtcctgaatcttggccatctgctggatagccgggatggcgaactgctgggccatgccctcggccatggcctgggcacgaactttctcgccttcggcggtctgcttgtcgtcgatcttgacatccccgacctcgaagacatagacgcccgaaagtcccttcacgggagccgacagggcgcccttctcggccgatgcgatggcgcccaccagacgaggctccatgcccacgccgttcacgtagaacgaaccgaaagtcacatcggagaagtcctccacctccgagccgagacttgcagcctgctcggcgagggtcgaacccgaaaggctcttgacgatataatcgtattttttgtcgcgaagaagctgcgaacggatctgggccgaaaccttattcagcggtgcgtactcattgtcgtcgatctcggtcaacgtggcaatcacgtagtccttgcctacgttaaagatcgccgaaaggtcgccctccttcgctccgtaggcccagcgggccacctcgcgcgaatcctcaaggccgcggatcgtacggtcgccctgggcgatcgcagccacgcggggcgtcacggcagccgtcgaagcggcatctgcgaatgcggcggccgaacccttggcgttgaccatgaacgaaccggcctggttgtgcacgtcgcggcgcgtggcggccgaagcctccacgggataggtgatcgtagccacctgcacgtgtttcgaaggtttgtcggcacggtatacctgcatcagctggatggcgtcgcccgaagcgatcttcacgatgtcgccctgtctggcattggccaaagcggcggcgaactcgcccgtgaaggccgagaaaggcagcactcccacttcaccgccgttggcggccgtagcgtcgtaaaccgaataacgggcagcggtctgcgcgaaatcgccccccttcttcagcaccgtcagcaggctgtcggcaagcgcctcctgcgcatagggcagcacgatatgacgtacgcccaccgagtcgggaaccatcttcgaatcgagcgcgcgggacatcgtccactcgttgttcttcagcacgggaccgtacatctcgcccgccatcagcgccttggcctcctcgtcggagagctgtgcggcggaaacgtagctgtcggcgatcttgccgttgcgattggcgcggacgaaggtcttcacctcctcggcggcggcgaactcccggcccacctccgtcacgctcttctcaagcgccagcaggtcgttgtccgtgggggagacctcgaatacgacatacgaaatcgtacgcgacggggtctgcttgaactggttcttatggctgttgtagtaagccttcacatcacccgacgacaccttgacgagcgaatcgggaacggccgagaacttcttgccggcccacttgcccgagaaagacttgttggcggcctcgacaccgcgggcgacctccagcgaattgacgtaaacgccgcccttcaccagtccgaagtacttctgcacctcgcgctccagacgggcctgctcgttgagctgcgcccaggcattggccgcctcggggttggtctcggcctgtgcgaggaactggctgatggcagccacgctgtactcgcccgtgcggggatcggcgaaagcattgtagaaagcctgcgaaggatgctgtccgctgaccatcgccagacgctccggctcggtgacgcgaagtcccatccggtcgaaaccgggcgtcagcacgtgcttggcgatcagcgcctgccaggcggcattggccagcatggccgactgctgctcgtcgctctccggcatgttgttctgcgacttgatcgtctcgtactggtcgtagtactccgaatagttgatcttctcgccgtcgatcacaccgacacgcgggtcgttgcccgagaagcccatttcagtcttcagagagaggatgaatgccaagagggccagtgcgatgatgatcgaaagcacgatgccgaacttggttcgtaaagtgtttaaacttgccatataaattgttaattattcgtattgtttcgaattatcagccaaaggtagtaaaattaattgtaaaaagaacagaataaaagtaaaaatatacgcacgcttcgcccccccctaatccccgccgggacgggaatttaccggaaaggcggcggaatccggcccacgctacaatttcttcacccgcgccagttcgatgcgcgaacgcgtcgtacggagaatccgcaattgcaggccgccgatgaaaaccgtctccccggcggtgggaataccctcgtaattgaagatgatgaaaccggccagcgtgtcgtattccttgctctcctcgatgccgaggttgtatttttcattcaggtatttcacctccaggcggcacgagagaacatactcgtcggggccgacctgcttttcggtgaggtccggaatgtcgtgctcgtcctcgatctcgccgaaaatctgctccagcacgtcttcgagcgaaatgacgcccgccgtgccgccgaattcgtcgatcacaacggcgatgttcgaacggtgcttgataaaattctccagcatcagctgcaaaggcatggtctcgggcacgaaattgacctccatcatcacgtcggcgatctgccggggccgcgtgaaaaggcttttcgaattgacgtagcccacgatgttgtcgatcgacttgcgccagacgaagatacgcgaatatttcgagtcgacgaaacgcgccgtgagctgttcgatcgaggtgtcgtcgatgtccacggcctcgacgtccacacgcggaaccatgcagtccctgacgcgcaggtcggcgaaatccagcgcgttctggaagagtttcagctcgttgtccggttccgaatgctgctccgggctgttcgtgtcgagcagcgccgcaaggtcctcgcggtcgaaactcggagtgatgttccgctcctcgacgcggcggcccagaaggtgcagaatgccgtgggaaagcagcgtcgtgaaacgcgccaccggatagagtacgatgtagaaaaaatagatcaccggcgccagcgcgcggtaatagaaattgggattgttcctgaaaatcgacttggggagaaactcggcgaagaagatgatgatgaccgtcgaaacggcggtgtccacggcgaccgagccgctccgggcgagctgctcccaccccagcgaggcatagatgctgcgcagaagcagcgacatcgccagcgaatagacgaccagtgcgatgttgttgcccacgaggatcgtggtgatatactgccccggatggcgggcgaaaacctcggcaatctggtcgaacatgcggttctgcttgcggtcgatctccagcttgagacggttcttgctcgtaaaggcaatctccatccccgagaaaaaagccgacagcaacagcattacgacaatcaggacgacggtggtgagcatcgctttcagtttttgagtttgggttcgacggaaacctgctcctcccgggagccgtccagcattttcagcggccggcgctcaacttccgcctcgggtcttccgacctgcctttcagccggtccggcgggaatctcccgggccggagcggccctcccggattcggacgtccggacggcggaccgactgtcggagggccggctgtcggagggtttcggaaccgggcgcacggacgtggaatccgtggccgcagagtcggcgctctgcttcatctcgacctccatacggcccttcatgcggcgaaaacgccagtccttgaactcctcgtccgattcgaaaccttcgccgatgaagacatcgcggccgttgttctgcacgatcttcgaatcgacgttcgaatagattttcttggtccgcgcattccagaacaactgctgggtgtagagggtcttgccgtcggatttctcgacgacgacgttgcccttggcctcccacagttcgcggttctcgtaatagatggcgtagttggccgtcagcacggcgtccaccgtggtcagcgaatcgttctggtaggtagtgatcttcacgcccttgcggaattcgcggtaaggttcgcgggccagcgaataaccttcgagcagcggcgtgacgaaatggtacgaccggcggccgttctgcgacatcacgaccgaaaggtcctcgctgtattcggtcatcatcgtctcctcggaagccgacgcgcggcccgcatccttgtccgcacacgagaatagcaagatagcactccccgtcacggagagtgctaccctgatcgttcttgtcatgcgttttcccatcgaagcctgtcgggagcgtgttttttagcgggcacggacggtggtggtgataccggcggccgttccgcaggtcaccgtatagcgcgcaccctcctgcaactcgttgaagaagcactcctccgagctggggaaaaccgaacggaacttgccgagggaactcttggcgtgctccatgtactccgaatcggccgggagcagctcgaccgccttggccatcgtatcgtaagcggcccaataggtcgccagaccggcgaaaccgccgcacgaacctgccgacgaagcatagcactgcgccaggatgaagtacggaacgccgtcctcgggatccaggtcgcgggcctggcgcgcagcggcggcagcgcccggaatgtcgttggacacgaggcccaccagcgcgatgcgcacgagcagtttctgacgctcggcggggtctttctcgacatccagcgcctcgttcaggtaggtcttcgcctttacatagtccttcttgttctggaaagcctgggccaggaacatggccgtctccgacgaaggcttcacctgatagtatttctcggcgatcgagaagtagaaatcaccgtcgcacttagcgcgcgacatcagagccacggcctgcgaaagcagcgcctcgtcgtcgggagcggcggccagcttgcccttgaagagtctttcgagattctcgcagcttgcggcgccgctcaatccgaacgcagcgtcgaactggctcttgtactcggcggcagcggggttcttctcgaagaatggcgtcagacggtcgtactcggcgatgatctcgtcgggcatcacctcgtcggtattcctgtaatcgtcgcagaggttcgagaaataggccacgacggtctcgggatcggtgttgtcgccgccggcctcgatggctgcgcggaacgcttcgcggatacccttgcggtcggcgggtttgtacatcagatactcacgggccttgcggtcgaggatatagggcgtgccgtacttgggatggtcgccgaaatactcgttgcgcaggtcgtaaacgatcatcagcgagtcggtgtaggtgtttttctcggcgatgctcttggcgcgcgcgatcttgttcttataaagcgtgatgccgcgcacaaaggtattctgcgaagccttcggacatttgtcgagcagctccttgaggtaatgcgcggcagcgttgtaatccttgttgtcgagcgactccttgaggaagttgctgttcagaatgttctgctcccgctcctgaggagtgtcaccccagaccgcgtacttcggatcactgaaatcttgctgtgccatcgctgcgactgcaaaaagcgcacacgcagcagaaagcaggaatttaacgtttttcatcggtcagattaatttttgtgtttctatcttttatttttgcttgcctgtcacatcaatcgaacttggagcgcatgaaccaatattcgccgttctccatctgtcccgcgaagagcgtgaagccgatcgcaaacttgaaatactgctgccggaccagccccaggcggtcggcgatgttgtaaccgcggcgaccgtactcgacaccgatgtcgatggccgagaaggcaccgcgcctcaccggaatgccgatgcccgccgtcacggcgtactgcgcgagcttgtccccgttgaacgtctggttgtaggccccgtagcggaaacccgcacggtaggaccagcgtttgaggaagtgacgcgcatcgtaacggttcggggtgtattccacacccatcttgatcgtgctcgtattggtgtaggccaccttgtattccgtcttgttctccccgctgccgctggttcccgtcatctcgtagcccgagttgcgaccgccccagttctggaacacataatccacgccgacggcccacctgccggtctggtaataggcccccacggccagctgccggggcagcaccagcttcaggtgcgtcgtatcgcccttgacgaccgtgttgtacaggtcgccgatatagagttttttcgtcacctccgggttcaggtcgccgccgaagtcgtacgtcgcgccgaaggtcaggatgcgcttcgcgttcagaatcgcgttccactgcacgccgacctgccccttgatgctcgaaatgctgtaattgtcctgccccaccgtcgaggtgaaggttccctcgcccgtaatggcggtcggggtcatcacgaacgtacggtcgatgtcgccccagtaatactgtgcggcgatacccaccgaaaaattcttgaacggctcccagcccaggccgaccttgacctccgtcacgtcgccctcgccctggtagttgtactgaatattgccgacgttggcgtaaatggggtcttcgggatcgtattcgtgataatacttggtcctgtaacccaccgaactgtaaggcgtgaggctgaaaccgagtcccagccgcttcgccaccggcatctggaaagcgatgtcgtgaaagttgaacgtgttgtaggccgtccgtttcccgacgcctccgaccgtctgggcgttgtagtagttctgcccctccaacccgaagttgaaaaggaaagtcttctgcggagccgcgctgtaagccgcggggttgagcaggttgaccgtactcaccgaacgcatggccacacccgcaccgcccatcgagcgcatctgcagcgtaccgggggtattctgttcgccgatgccgtacatcgtatagggcgagaatgcgttaatactgcttgtctgggccgaaacggcaaaaggaaacatcgctgcagccgcgacaaccagcttaatcaaggtgttcttcacttgcattgtactctaaaattcgatccaatccgcaaaagaccagattacaatttgcaaatatcgtgtttttaattcttttcgcaaagtatttcgcgtccccgccggtaaaaattacgcataaatcgtcgatttttttctccatccgggccatatagccctcaatttcgaaggtcagcgagttcatcacccccaggcggatggcctcttcggtggtgagcccctgcaactccccgctttcggtcggaccgcacagcggcaggcaggccgtgtagtcgtggagcgcccgaaaacgggttttcatccccggcgaaatgcacccgccgcggaacgtgttgtcggccgtcaccaggtcgatcgtgacggccgtgccgaaatcgacgatcagcacgttgcgccccgggtaaagcaccgtggcgcccacggcggcggccagccggtcgcggcccagcgtctcgggcgtatggtaagcgttggcaaccggcacgggggtctgcgaggtgaattccagcaggtaatccgcatagggcctgaccgtttcgaccacgtcgtccgcttcgccgcgcgtcgaagcgacgacggccttcgcggccctgcggccctccagcaactcgccgagcatcgacggatgcagccgctccacgcagcgctgggcgacgatccgtccgccgtcaaaaacggccaacttgacaagggtgttgcctatgtctacgatcagattcaaagctgctgcagcgttttgtatgcgtcttccacgtctttgacattcctaacggtcatcgccaaccgattattgtgctgtttgagcacaaatcggtcgggccgctgcgtaacccgctgcaacagggtcataaaggcctcgctcttgtagaaaggcgagttctcctcgcccacgaaatgcacgatcatcagcccgttcttgaccttcacgcgctccatgcccagacgaatggcctcccagcgcaggcgcacgacgttcaacagctccttcgcggcgcgcggcaggggaccgaaacggtccgcaagacggctctcgaaggcctgcaaagcctcctcgtccttcgtcgagtcgagttcgcggtagagtttcaggcgttcggcctgctgcgaaacgtaggcgtcgggcagcgcggcctcgacctcgatgtcgatgtgcgcgtcgtcgatgaaacgcatctgctccacgacctcctgctccccgtcgctcaggcccgggacatgaagcccctcggcacgcagttcggccaccgcctcgttcataatcttctggtaggtctcgaaaccgatgtcggcgatgaacccgctctgctcggcgcccagcaggttgcccgcgccgcgaatgtcgaggtcctgcatggcgatgttgaaccccgaacccaggtcggaaaactcctcgatggcccgcagacgccgccgcgcgtcggacgacagcagttcgtcgggcggcgaaagcaggtagcagtagcccttctggttcgaacgccccacgcgaccgcgcagctggtgcaggtcgctcaaaccgaagttctgggcattgtcgacgatgatcgtattggcgttgggaatgtcgatgccgttctcgacgatggtcgtcgacaccagcacgtcgaattccccgtagatgaagtccatgatgagtttctccagctgctcggccggcatcttgccgtgcccgacggccacacgggccttcgggcagaggcgcgtgatcagcccctggagggccagcaggtcctcgacgcggttgtggacgaaatagacctggccgccgcgggcgagttccgcctcgacggcatcgcggatgatctcctccgagaatacgtgcgactcggtgaggatcggctggcggttgggcggcggggtcgaaatgacggacaagtcccgcgaacccatcagcgagaattgcagcgtgcgcggaatcggtgtggcggtgagcgtcagcgtatcgaccgaaacgctcatctcggtgagcttttccttggcggcgacgccgaatttctgctcctcgtcgatgatcagcagccccaggtcgcggaacacgatctgcttgcccagcatcttgtgcgtgccgatcagaatgtcgatcttccccgaggcgaggtcctcgcggatctggctgacctccttcgtggatttggtgcggttgatgtactccaccctcaccgggaaatcgcgcagacgctcagtgaacgagcggtagtgctgcaaggcgaggatcgtcgtcggaaccagcacggcgacctgcttgccgtcgacagcggccttgaacgccgcgcggatcgccacctcggtctttccgaagcccacgtcgccgcacaccagccggtccatcggctgatccgactccatgtccttcttgatggccgccgtggccgactgctggtcgggagtgtcctcccagcggaacgacgcctccagctcgtgctgcaaatagctgtcgtgcgagaaggcgtagcccttcgaggccttgcgtttggcgtagagggcgatcagttcgcgcgaaatgtccttgacggctttcttggtggcgttcttcagcttctgccaggcgccgttgcccagtttgtagaccttcggcggctcgccgtcgcccgacttgtagcgcgaaatgcggtggagcgagtgcacgttgacgaacagcacgtcgccgtccttgtagaccagcttgatcgcctcctgcatgcgtccatcgcccgcggcgatcttcaccagcccgtcgaaacggcccacgccgtggtcgatatgcaccacgtagtcgcccgggcgcagctggttcagctcggcgacggtcatctgctcgtcgcgccggatctcgccgttgatgcggtaacgctggtagcggtcgaaaatctggtggtcggtgtagaggcacagtttcaggtcgttgtccacgaacccctcgtgcagggtcgtcgacagcgaccgcacgacggcctgtccgcggccgatctggtggaaaatattttcgagacgctcgacctgcgccttgttctccgaaagtatataggtatcgtaaccccgcagcgcaccccggatcatgtcgtcggccagcatctcgaaatttttattgaatttcggctggggcgacgtcgcgaacttcaccgttgcggccgcgggccgctcgggaagattgtcgcgcagcaggaaaatccggcttccggaaaggtcggccacgagcgagttgcggctcgtcagcagcgagtcgatctcatcgggatgctccatgtccgagagcgtcctgcggcggatgtcgttgaccctccgcaacacgaaatcggcgtcgtagaaccaccaggaagcctccgcgcccgcaaaccgcgcgaaggagaccttcgccgcggcgggcgtcccggcgttcaggtcggggatgatctccacgcgctccagcctgtccgacgacagctggctcgaaatgttgaaccgccggatcgagtcgacctcgtcgccgaagaaatccagtcggtagggtttgctctccgaataggagaagacgtcgacgataccgccgcgcaccgagtactggccgggttcgtagacgaaatccacgcgcgtaaacgaagcatcgacgagcgcctgctccagcacctcgatcgaaatccggtcgccgaccctcacggtgatcgtctcccgttgcagggcttcggcgtcggcgacccgctcggccagcgcctcggggcaggtgcagaccaccaggtagcccttccccgtgaaattccgcacggcgtgcatcgtcgccgtgcgctgcaccacgccctgcgcatcctcggcgccataggccgccgaacgcttccacgacgagggaaagaagtaaacctgccgttcgtccagcaggttgtagaagtcgttcagaaggtaggctgcggcgtcacggtcctcggcgacaaagacatgcacgcccccggattcggccacggccgccgcggcataaaacgaaagagcgccgccgaccagctcttcgaggtggacggtagcactcctgtttttatattcgcggcacagtctgccgagggctttcgacccggcggcgaactgcgccagctgctcgcgggcggttgccatgccttatttggttataaggtcgttatcctttttgtcatggtagtggatctcgacgatcccgatgctctggtcctcggcgatctcaaggcgcaccttgtacttccactcccagcggcggcgcagcgaccaaaggccctttcggaggaacgccgccacgtaaggactgacgaccagcttgatgaatttgtgtccgcggtcctgcgtgaggaacgaaatctggttctcgatcttcttgtccagcagcaccgtaggttcgatcttgcccgaaccgttgcacgtcgggcagacgtccgaaacgctctcgacggccacgggacgcacccgctggcgggtgatctgcatcaggccgaatttcgtgagcggcagcaccgtgtgcttggccttgtcggtggccatcagcttcaccatctcgtcgaacaacgcctgcttgttctgcgccttgtgcaggtcgatgaagtcgatgatgacgataccgcccaaatcacgcagccgcagctggcgggcgatctccttcgccgcggcgaggttcacgtccatggcggtctgctcctggttgtcctcggccttggtgcggttgcccgaattgacgtcgatgacgttcatggcctccgtgcgctcgatgatgaggtaggcgccgcgtttgagcgacacgtacttggcgaagagcgacttgatctgcttcgagatgtcgaagttgtcgaaaatgggcacgttgcccttgtagagtttgacgatcttctccttctcgggttcgatctggcggatgtagccgcggatttcgttgtacatcgcctcgtcgtcgacggcgatctgcgagaaggagccgttcagcgagtcgcggatgatcgtgttggcgcggttcatctcgctcatcagctgcgccggggccgacgccgcgttcttcttgatcgccgcgcaggtcttgcgccagcggtcgatctgggtctggatgtcgtgctcgatgtcctcgtccttggcctccatggccgccgtgcggatgatgacgccgaaattcttcggcagcaccgccgcggcaatgcgcttgagacgcttcttctcgtccgccgagcggattttctgcgaaaggaaaaccttcgaggtgaagggaaccagcaccacgttgcggccggccagcgaaatgtcggccgtcaggcgcggacctttggtcgaaatggcctccttggccacctggaccatgatctgctgccccacctggaggtattcgccgatcttcccggtcttctcgacgggcggttcgagtttcatgctctcgacgcggaacccgcgttttccgggctgctgcgaggcgacgagcttctgcagcgaggggaactgcggccccaggtcgaggtagtggataaaggcgtccttttcgtgtccgatgttgacgaatgccgcgttcagtcccggcatgatcttgcgcaccttcccgaggtagatgtcccccacggcgaagcccgtctggcactgctccttgttcagttcgacgagcaccttgtcctcgcacatggcgattgatatctcggtcggggttacgtttacgattaattctctgttcatctatcgtgtgtcgcgctccgggaaaccgggcgcggtatggctgaaattagtactgaagccgcgttttgctgtgaagtggcggcgaactccaaagggaaaaatggatgccggaaacgtccggcagaacgcggggcccggcgtccggaaaacccgcgaaaaaggcggaaaaaccgcccgaaaaatcggaaacccgaaaataggtaaagctaaaagaaccccttggcccctttagctttatctatcgttagcacaaaggtgctaccctactttttcttgtgacggttcttacgaagacgttttttccgcttgtgggtagccatcttgtgacgcttatgcttctttccgtttggcatagtccttaaattttaagaggttcttattatccgttatttcaccttcgctgcgaagctctttgcgggcttgaaagcggggatgttgtgttcgggaatggtgatcgtcgtgttcttcgagatgttgcgggcaaccttcttggcgcgcttcttcacgatgaagctgccgaaaccacggagatacacgttatttttttgggtgagcgacgtcttgatgctctccatgaaagcctcgacgatagcctgcacctgcaccttctcaacgccggtgcttttagcgatttcgcttacgatatctgcctttgtcatgtttatatagtatttaaaattaagttcatccaaaatgattcggagtgcaaatatacgctttatttacatatccgccaataatcggcaattttttttcacttttttcccgcggcagtgtagtctgcacgttcacaacacgataacaaatatcgggcaaaacccgggccaaaattaaaatattctatatcagttatttattccgcactgcgcctcttccgccccgacaatcggcaaaaagctgcgaaacaatacgttacgcatcacttcgcgcccagccacgtcagacggtgccagagactttccagcggtccctgccggtggccgcgcagccaccaacggcaaaaagccgcctgcaaaacgaagaccgcaacgccgatcaccaggctcagcgcatatccgcaccgggaggcgagaccgagtccgaacgggaaaaagatcagggcgccgacgacggactgcgcgatataattggtaaggctcatccgcccgtagaagcgcaggccgtcggtcacccggcggaaacgggccgtgcggtagagcagcacgaacgaagccgcaagcaccgccgtgaaggcaagtttctgccacatgtcgagcacggtcgcagccatgcgggccgccgtcgcttcgccgaaaagcccgtgcagggcctggagcggcacgaaggcaacggccccgacgatcagcgtccgcacccagaagcgcgcattgtccgccgaatccgagaaaagccctcgacggccgagcagcagacccagcaggaaaaggcccgccgtctggctgtaccgtccggcattgacggcccacagcagactcgccttctgcccgagcgtgacgttcccggcgacgaactgccagaaatccccggctttcgtataggccgcaacctcgccgtacatggctccgacgcccagatcgggcggagcgaaacccgggtcggccagcgcacggaagcaatggtaccattcgacgggctgcacgagaaacagcagggccagcgccagcacggtccggtcgttcagacgccggacggcgaacagcaccacgcccacgaggctgaacagcagcagcacatcccccgcgggaaaaaaggcggcgttgagcgtggcgaaccccaccagcaacagcagccgccagagaaagcggcctccgaagtcttcgccgcggctctgccgggaggcgtattgcagatggaaggtgaagccgaaaagcagcgcgaagatcgcataggccttgcctgcgaaaagcgcgaacacgaccgcaaagacaccttcgtcgagggccgcgagccacgcaggcgacgaagccggataaaccggaaagataaaatgttcgaggctgtgtacgagcaggatcgccatcacggcaaagccgcgcaaagcatccaccgcgtcgatacgggatttttctgttttaagcacaatgaccgttattttgtttttttcggagtaaaggtagcatttaatcggcagccgggccaataaaccgcggggtttttgcgtttgatgataaaaacattaattttgcaaattctaaatccgataacggtatggtcaaaatactctgggtcgacgacgaagtcgaactgctgaaaccccacgtgctgttcctccagcagaagggctatgaagtggacacctgcaacaacggatacgacgcgatcgacatggcttccgaaggagcctacgacctgatcatcctcgacgaaatgatgcccggcatgacgggactcgaaacccttcccaagatcaaggaggtgcgccccacgacgcccgtgatcatggtcaccaagagcgaggaggagaacatcatggacaaggccgtggggtcgaagatcgccgactacctcatcaagcccgtcaaccccaaccaggtgctgctctcgatcaagaagaacgtgcaccagcaacagctggtgaccgagcagaccaccgccgactaccgttcggagttcggccgcatctcgtcctcgctccagatggccgacacgttccaggactggtgcgcgctctaccgcaagctcaccgcatgggaggtcgaactggcggaatccaccgaccagagcatcaaggaggtgctgacctaccagaaaagcgaggccaatcaggagttctgcaagttcgtgcgccgcaactactacaactggatcaacaagcgctcggacgacacccccgtgatgtcgcacacgctcatgcgcaccaacatcttccccgtcgtcgacgagaaccccaagaccacgctgctgctgatcgacaacttccgctacgaccagtggcggtcgatttcgtcgctgctgcggggctggtacgacgtggcgcaggacgacttttactgcgccatcctccccaccgccacgcagtacgcccgcaacgccgtcttcgcggggcttatgccgctggccatcgaccgcctgatgcccaacaagtggctcaacgacaacgaggagggcggcaagaaccagtacgaggaggagtttctgaagcggctgatgagccagaacggcaagaactggaagttctcgttcgacaagctggtgcgcccggagcaggggcgcaagctggtggacaacatccagaaggtctacgacgccgatttctcggtcatcgtctacaacttcctcgacatcctttcgcacgcacgtaccgagaccgacatcatccgcgaactcacggaggacgacgcggcgttccgctcgctgacgcgctcgtggttcgagcactcggacctttacaccatcctcaagctcctctccgagcggggacacaccgtcgtcatcacctcggaccacggcacgatccgcgtggacaacccggtgaaggtgaccggcgaccgcgagacctcggccaacctgcgctacaagacgggccgcaacctcgcgtacaactcccgcgaagtctacgaaatcctgaaacccgaggacgtgcagctgccgtcgagcaacctcacgtcgagctacatcttcgcctacaacaccgatttcctcgtctacaacaacgacgcgaaccgccacatccgctactaccgcaacacgttccagcacggcggaatttcgatggaggagatgatcgtaccgtatatcgttctaaagccaaaacaatagatgaaaaccattcacatcacctcgcaggacgagcttccgcaggtcgccggggcgatcatcggctcgctgggccgccgtacggtggtcgccttccgcggcgagatgggcgcgggcaaaaccacgctcatccgtgaaatcgccgcagaactcggggccgccgacaccgtgaccagccccacgttcgccatcgtcaaccaatacaagggcgagggcaaccgacgcatccaccacttcgatttctaccgcatcaacgacctgcgggaagccttcgacttcggttacgaggagtatttctactcgggagacctgtgtctggtggagtggcccgagaagatcgaacagctgctgcccgacaacacgatgacggtgcgcatcaccgtagacagcgacacggcacgcaccttcgagatcgactgaccgccggcttgaaaagccggattcagaaccggccggattcaaagaccgccaaccccggatcacgccgtcgggagctgtccgcgcgcagcccccatatcgccggcccgtttttccaaggccccgcccccgtttccgcaaggcccctgccgcttcgcaaccgcatcccgggacgaaccccgcaaaggttcgtcccgttcgtttgccgccaccggaaaaatccctatctttgcagcggacataatcgccgcccatgaaaaaactcttcaaaatcgcaggtatcgctctgctttcgctcatcggcctgctgctggcaatctttctgctggcccgtttcgtcttccgcgaacaggccattgactatctgaccggtctcgaaaaacagcagcgcgtggagctgctccgcgccgcaggcccttacgccgccgacaccgtgcagtatcgcttcacctataaacaggacaccgtccgcgcccgtgaaatccgcgaatacttccggctcgacaccctcgtgaatcccgccgcgacgacctgggacaacgcccgcgcgctggcgcagttcgtcgcccggaacattccccacgccaatcagaaagtccagcccgaaacgcgcaacgcaatcggactgtgggagtatacccgtaccgtagaaccggctttcaactgccgcctgcactcgatcctgctccacgagctgctgctctcgcaagggatcgtcaaccgcttcgtgacgtgccttccggccgactcgctcgatcgggactgccacgtggtcaacctcgtttggctgcccgaatgcgagaaatgggcgatgatagactcggacatgcaatcctacgtcgcctcgcccgaaggcgaagcgctctcactcgaagagatgcggcagcgtaccgtcgccggagagccgatgaccgtacaccggcttctcggaacacgcgacccggagaattacctctcctactgggccaagaacctctactggttcacttgttgggagcagaccggatacgacaaggaggtcggatacgaaggccgcgccatcgccctgctgcccccggggttcgagggattctcgctggatgaatccaccgtccggacctccgacgccgaccgtttctgggccgccccgcagccggcggaatgatccggacccgcaaaactttcaacttataattttcaacgcgcaatatgcaggaatacatttcgaaacaacaccggattttacgtcccgccgaacagatttacgccgtcatcagccgcttcgacaacctcaccccggccgtcgccgaccgcgtcgaggagtggcaggccaccgaggagacctgttcgttcaaggccaaaggcttcaccgtccgtctccgcatggaggagcgcatcgaaccgcgccacgtcaagatcgtgggcgacgacgggggaatcccgatggatttcgccttctggattcagctccacaaagtctccgacaccgacacccgcatgcggctggtgctgcacatcgagctgaacatgatgatgaagatgatgatcggcggcaagctccagggcgccatcgaccagatcgccgaaggcatcgcccgcgcgatgcaggcgcaggcgtaggacgcctgcttcaggggcgaccccaggccgacaggcctccgatcccgaccattgcactcgcagcgtaggacgcctgcttaaaaaagcaatcgcaggacgacacggcctccgaccccgaccgccgcttccgcagcgtaaaaattttcagaagacaaccgcagatatgagaccgaccgactacatcgcttcgctgttcaagccttccggaggtcccggaggggagtctgcggcatatgacttcgatccgatcggcagttatttctacaactgcccggccgaagagggagtctttcagatcgtcgacgccgagacgacggccgacctcgacctgaacgccgtgttcgaaaagatcgaccgcacgacctcacgtgtcggccagcaatacctctacgcccggctgcggacgctgcggggcgaggaggacgccgcggatttcgaccgccgggtcggtgctttcgaaaacgacgacgaactgacgcaacggtgcgccggacaccttgcacgcctcgcgggcgacgacgcctacgacctctgccggctgatcttcgacaccccggtccgggtccgccgcatcggactgatctacgcgctgaccgctgcggccgcggccgcgctgcttctcgcgccgttttatccggcgctgttgctgctcttcatggcgatctacgcggtcaacatgtatattcattacagcaacaaaatcaacatctccctctacacatcggccgtaaagcagctttccacggccctgaaaaccgcgcggcaccttgcggcagagggggttcccggctcggacgaagccgcacggccgatccgccgggtcgccgaggtcgagcaccgcagccgcatcgtcggcacgcagggcgacggaggcaacgaactggcggccgtcggatggctggcattcgagctggtgaagatcgcgttcaacatcgaggtgattcttttccaccgcttcaccggcagcatcgcgactcaccgcgacgccatccacgacgtgttccgcttcatcggccggaccgacgcggccatctcggtcatgcgcctgcgccgcgccgcgaagacctgccgcccgacgttcaccgacggcaaatacctcgaagccgtgcaggtcgtgcatcctttgatcgagggctgcacagcgaacaccctgacgctcgacggcacggggctgctgctcaccgggtcgaacatgtcgggcaaaaccaccttcatccggacggtgatgctcaacgccctgttgggcgagaccctctgcacctgttttgcggagcggttcacggcgccctacatgcggctccactcgtcgatccgcatttcggacgacatcaccgaagggacgagctactatttgcaggaggtgctcaccgtcaagcggctgctcgaagacgcggaccggcccgcggcgtgcctcttcgtgctcgacgaactgttcaagggcacgaacaccaccgaacgtatcgcggccgggaaagccgtgctggcgcgcctcaaccgcgggccgcacatcgtgctggccgccacgcacgacatcgaactggccgaactgctgcgcggcgacggctacgaactgcaccacttccgtgaagaggtggccgacgggcggctggtattcgactactgcctgcacaccggtcccctcaccacgcgcaacgccatccgcattctggagctgtacgactacccgcccgaactgatcgccgaggcgtacgacacgcagcagaaactgctcggcaacggttaaatcgcgcccgttttataaccgggcgcgatccgttcagaaaccggaaagggcgcagaaccggaccggaagcccggctgccatcttccgcccatacgccccggttcctaaccgggctatatccgcggcttctgcaacatgcggatcaccagcgaggcggcatagatcagcagggcgtaaatcagcgatatgaatgataccttcaagccgccggcaaccagcgtcaaaggaacgtcgcctacctgctgcacgacttcagcggcattgaacatccctttcaactgccagatcaggtcggtcaccaacaccagcaggccgatctctctgacccatgccggggctttccacgcggcaaacaacagacaaatcaattccacggtcaggatcgacatgatccatgtcccgccctgaagaaacaaatcgaacataacgcaaaagttttaagtcatcgcgggaccattcccgtatggcaaagataggctgccgcaggccgaaaccacaaaaaaaccgcccgtcgaatcccgttcttacgccgtcgaatcccgccgatcggccccgggagcgttttttgcgggaccgggcggggacaccggagactgattttacctatatttgtaaaaacggaaattccgcatgaaacagtttctgcccgtcgtctggtggctcacggccacgctcgtcatcgcctttgtcctcgtggggttggggtatctcttcgccgacgccctcctgctcggagtgctgttcctgcccggaatgctcacggcgcgttacttcgtgccgcagctgtcgttcgaaaaccgacggcagggaatcctcgacaccgtctaccttgcgctggcgatcctcggcatcgaatacctctcgctgatgctgggccatgcggtggtgctcggcgccgacgaaggcggaatgccggggctgctgctcaacccgcccttcatcctgctggtcctgacggccctcatcgctccggaaatagctctcgaaaaacacctcgaacgccgctgtccctacgcccgttcgatcagtttcgtctccgaccgccgcaaaatcacgctcgaccccgcggaaatcagctacgtcgaatcgaacgacagcgaagtgtggattcacaccgccgggggcctcgcctaccgcaccaaaacccgcatttcgcaatgggagacacagttggacagccgtttcctgcgcatccaccgctcgttcatcgtcaacacggcgcgcatcgaccgctgctgcccggcacacgtggagatcggcggaatgaccatcgagatttcgcgcaaataccgggaggccgcgcgccgacagctcacagagcaggccgcaaacgcctaatttcggcccatagccgccgccacgcagcggatcgtcgggaaagcgtcgcgcagattgtctgccacctcgcggggcgcacaccacaccgcggagtcgatcccctcctcggtctggggcgtcagaccggcgcacccggacgcatgcagttcgtaccagtgggtccgtttcagttcccagcgcgcagttttcggaaaatagtaggcgtgcagcgtctcgcacagcggccgcacgacccgagccgccacgcccgtctcctcttcgacctcacgcgcagcgcactcctcgatgcgctccccgcactccagatgccctttgggcaggtcccagcggccgttgcggtggatcatcagccactcgccgcagtcgttcaccaccacgccgcccgccgcctcgaccggcgtgaactccgcagcaaaggccgcgaaagccctgtcgggatcgtccgaaacgacggccacggagttgtgcgattcgagaaaattgagtatcttggcccgtgatatgccgccgcaggcttcggccgcaacggcgtaccacgccccgccgggagcttcggccgtgaacgccacggccctgtcggcgaaataaacggtacggttcatcttttcatcggaaatttgtgaacaaatatacgtaagaaacctcaaaaaatgaaaaaaattctcctgatgacggctattgcagctatgggcctcggcggatgcgacaagcgtcccgagcctctgaagatcgacaatgcgctgacggccgaagagatcgccgccggacgcctcacccccgaggtgatgtggaagatgagccgcgcgggcggctcgtcgctctcgcccgacggccggacgctcctctaccagcagaccgactacaacatggccgagaaccgcggcgtgacgacgatccgggtcgaggacatggactcgaaggccgtgacatgcctgacggacttcacgtcgaacagcctctcgccgaagtggagcgccgacggacggcacatctatttcctctcggaccgcggcggttcgatgcaggtgtggcggatgaacgcctcgggcggcgacgcgacgcagatcacgggcagcggcgacggcgagggcgttcccgacgtggagggcttcggcgtaagccccgacggaaagcacatctggtgggtgcagaccgtgcggacggccgaccgccgttcgtcggacatctacaaggacatggacaaatcgaaagcccgcatctacgacgacctgatggcccgccactgggactactgggacgagggcgaataccgccacatcttcgtcggcgagctgggcaagggagtcgtgacgggcggcagggacatcatgcccgacgcgcagtgggacgccccgctggcgccctatttcgacatggccgagatcgcctggaacaacgccgggacgatgctggcctacacctgcaaaccgctgacgggcaccgcctacgccgtgtcgaccgattcggacatcttcgtctacgacctcgaaagcggcgcgacgcaaaacatctgcaagcccaccaacttcaataccggcaaacccgtcaacgatcaggcggccatggtcggctacgacaaatatcccgtctggtcgcccgatgattcgaagatcgccttcctctcgcagcgccgcgcaggcaacgagtcggacaaggcccgcctgttcgtctacgactgccacaccgccgaaatgcaggacctcaccgccgacttcgactacaacgcccagaacgtcgtctggagcggcaacgacctgatctatttcatcgccccgatcgaggcgacgcaccagatctgccgcgtcgcgccgtcggtcggcgaggtggaggtcatcacccgcggcgaccacgacatcaacgccttcacgatggccggggagcggatcgccgccgagatgtgcacgatctcgatggccacggagttcttcgagataaatccggaggacggctctttggcgcaaatctcggccatcaacaaatcggtctacgacaatatcaggatgggcgaggtgcagaaacgctgggtcaagaccaccgacggcaagcagatgctgacgtgggtgatcctgccgcccgatttcgacccgtcgcaaaaatatccggtgctgctctactgccagggcggcccgcagagcgtcgtatcgcagttctggagctaccgctggaattttcagctgatggccgcacagggatatatcgtcgtcgcgccgaaccgccgcggcctgccctcgttcggacaggagtggctcgaccagatttcgggcgactactcgggccagaacatccgcgactacctctcggccatcgacgacgtggcccgcgaaccgtgggccgaccgggagcgcatgggctgcgtcggggcgtcgtacggcggctattcggtctatttcctcgccggatgccacgagaagcgtttcaaagccttcatctcccactgcggcatcttcgatttcgactcgatgtacggcgaaaccgaggagctgttcttcgtcaacaacgactacggaggcccctactgggacacggcgaatgccacggcgcagcgttcctacgccaactcgccgcacaagttcgtctcgaaatgggacacgccgatcctgatcatcaccggcgagaaggatttccgcatcccctacacccagtcgctcgaagccttcacggcggcccgcacgctgggcattccggcgcggctcgtggcgttcgaaaacgaggcgcatcaggtcttcaagccccagaactcgctggtctggaaccgcgaattcttcggctggctcgacaagtacgtaaaatagccgacccgacagcgaacgagggccacccggaccggaactgcgctccggtgaaagcaaaacctccctgccggcgggcagggaggttttttgcgctccgcaccgccggaaaggcgcatccgtgaggataaaaaggaggctgttcgtgatgaaaaatccggcgttcgttgaatttatttccgcgaacgggaacctgtacctatttttgtacacattacagataaaagaatctattctatgcgaattaatttccggattatttggctcgcgctgcctctggtcttcggggcatgctccgattcttcggatgcggacacccggcccgcgaccgaaacaatcagcgtatcggtaggctccggtccgaagatcgacatcgaatccgaagacaggtcccgcacccagctcggcgaagacggagtgtcggtcaaatgggcttccgacgaccagatcgcactctgggccgtcaactcccgatccgagaccgtcttcagcaaacaggctttcaaactctaccactacaacaccgactacaacacggccaagttcaggggagacatcccgcaaatgcccgcggacacctacacctattatgccgtgtcgcccgttccgtccgaaagcgacggcacgcaggccacctacctgatccctgacgtgcaggacggcggcttcaacggcgactgggacgtgatggtggccgatccggtcaaggccccggctctggagaagaacgacaccggcgagacggtgcagttccagttccgccacaaagttcacgtgctgaaaatacgcattccgaaaaacgacctgggcgaaaaggtctcggagatcacgctggcatttccgcagcccgtcacggggcgcatgacggtcgatgccgccgaccccgatgccgcgccgacgctcaccggcagcaacaacacgctgacgctgcgtttcgacactccgaaggatgcgagcgacgtggtcttcgccgtcatcgcaccggtggaactcaccgccgagcagccggtgaccatcaccgcgatttgcgaagccggggaatccgagccgcgcaacatccccggcaaacacttctccgaaggccacaccaccccgatcgcctaccacattcccgccatcggccgctattacacgcgtctgaacttctcgctgcctgcggacaagggtacggcgacgctgggcgaggcggtcggaaagatcaccctcaccgcccccgaaggctcgctgttcgacaacggcacgaacatctgccagttcacgcccgacgccgagggcaaatacacgatggtgctcaaaccctcgtggaccgacaacctctcgggaaaagccgtcacggtacagtacgaatcggaaagcgctgtcgtatcgaacacgctgacaatgccgcagatcaccgaattcggcaacaacgacatcacgctcagcgtcccctacctgctggcggaggatttcagcaatatcatccagttcgactacgactgcaacgtcggaacgggaacaagcagcagcagcgccggaaacaaggatgcgcacctgctgtccgacaagggcgccatcggatggacggcggctcgtgtgggcggggaaaccgggaaatgtatccgaagctcctgccggttcgaaggcggaggagccggcaaggcttcatcgtatgcccgctacccgggacgtatcgactcgccgcccgtcagcggtatcaaatccggcaaaacagtcagagtccgggtttcattcgattacgtcggaggacaggactcctggatgatggacagtaacaaaaataagggcggaacatacggcaatcctacgttcaattacggctacacgaccaattcgggccagcccaacggcggagacaatcttgaaaaccccgtcgaagcggaagacatagccctcgaaaccgacaaatcgtggaataccccgctttcgaattggaacaccaaaacattcctggccgactttaacagcgcccacagaatctcatggaaggtgaatgtcaaccgtatcggcaacgtatcgtcctggaccggaatattcggcgccaacggcaatcactacctctacctcgacaacatcaaagtatccatcgtcaacgaataaccgccatgagaaaactgctttacctgcttgcatcggcggctgtcatggccggaggatgctccgaaaagaaagagaccccggccggagagggctgcggaaccatccgcatcgcctgcgaggccgacgccacgattgatgccgctgcggcgatggccgcggttcagggcgcgacccgcgctgcggcaaaacccgacggcaaagatttcacgctccgcatccggggtgaaaatttcgacaaaagctgggcgacggtcgcggcgtataacgccgaggagaccgcctactccttccccgaaggccgctacacgatcacggtcacctacggcgatcccgaagccgaaggcgcggacaaaccctactacgcaggcgcgaccgaagtggaggtcgcggcgcgccgcaccagcaccgcgcagatcacggcgacgatcggcaattcgcagaccctggtacgcgccaccgagtcgttcaaaaaatactacaacaacgcggagttcaccgtgacgaccggagcgggcggcatcttcacgttccgtccctgcgacgaggccgaagcggaagccgtctgggtgcaggccggaaagccgctcaccttgaagggtacggcccggggccagagccaggacggcacgtcggaggggccgctctacaccttcacccccgagccgctcgaagcggcacgcccagccacgcgccacatcttcacgctcgacgccaagaaggccggcagcgcgacgctgaccgtcaccctcggcgaaggatacaccggaccgtggaactcgacgtggaactcaacgacgaggccaccgaataacgcaaataaaaacaccgagatatgaaaacctttaccaagattctgacggctgcggcagcgacggcgctgctcgcgaccggctgtgtgaacgaagatcccgcctataagaacaacgagccgggcactccgcccgatcccaacgccaaaggctacctgacgctggcggacatgagcatgcgcgtcgtggtcgacaccgataccgaaacccgccccgacgacacgtcagacgagacggcgaagccccagacgcgcaccgacgaggcgcagcccgacgtcgacacattcatcatcgaaattcgcgacgcaacgggcaagctggcgctccaggagacttacggcgatctgaaggtctcgatcggcgaggcaggcaggctggagcttccggtgggcggctacacgatggaggtccgttcggaagaggccgccacgacgccggcagccgaatgggaacaccccgtctatttcggttcgcaggagttcgtcatcgagaagaaccaaaccacgcccatcaacgaggtcgtctgcacgctgaacaacatcaaggtgacgctgatgtgttcgaaagacctcgccgaccagctcaccgccgacaccaagtcgaccgtcacgctgggcgaaacgacgatgaccttcctgaaggatgaaacccgcgcggcctacttcatgccgcagggcgagaccaacacgctcaaattgcacctcgaaggggctttcgccgatacgcccgacgcacccgtccggatcaacaagagcatctcgggcgtcaaggccggacaatggcgcaagctctcgatcgtgatcacctactcggacaagggagacatcaaactggacatcgacgtcaacgacttcatggaggacgacgaaatcccggtcaacgatcccgacaaccccggcgaacccggacttcccgtcgccccgaccctcgaatgtccgggctacgacctcacgaaacccttccagcttctggcctcgatgttcgacgcccagggcaactacacccggccgttcgcattcaatctcgcctcgtccaacggcatcgggtcgttcgcggtgaaaatcacgtcggacaactcccggctgaccggcatggtgtccggaatcggcggtccggaattcgacctctgcacaatcggggcgtcggaccccgcctacacggttctcgcaggcctcggcttcccgctgggcgacgatctcaagggggcgacttagaagagtttcgacatcgcaggagccatgaaactgctctatcccgcatacgagggcacgcacgcattcgccttcgagataaccgacgccaaagggctttcggcccgggcgtcgctgacgctcacggtcgatccggccaacgaaggcccttcgattgtcggcgtagatttcaatatcgacgaaacgcaaacgccgtccgcagaccgcgacacggagatcgacatcacggcgcaaacaggcatcaaatcgctcgacgtgaccatcgactgcgacaacctcgacgccaaggaactcggcacgatgggcatcccggcccggttcgatctctgcaatatcgaaggcttcgaagatacgaacggaaccatgcatccggccgaagatgtccgggaggcgatttcagccctcggattccccatcgaggacgcagtcaaggacaaaccgtccattcggctcaagatcgacaagatgttcaccggattgctgacaggcttccccggcaacaacaatttcatactcacggtgacggagaacaacggtctcagcacgaccaagaccctgaagtattacgtaccggcgaattaaggctgacgaattatgaaaaaatacattaccgccgccctgctgttctgcgccgcgctgacggccgcctgctcgaaagagacggccgggagcgccgacacaggcgacacgggtgcgctcgaaatgcgggtttcggccacgcgggccgaagccgacggggaatacgaccccttgcaacgccttgccgtacgcatctaccgcgcgagcggcgagctgctgcgccaatacaccgcagagacgctcccctcacggctggagctgctcgcgggcgaataccgcgtggaggtcgatgcgggagaagccgtccccgcgtcgttcaccaaacgtttctacaaaggcgagaagacctttacggtggcagccggacagacgaccgtagccgaagtggagtgcaaacggcagaacgtcgtcgccgaagtgaaattcgacgccacggtttccgccgctttcggcgagaatttccatgcgtgggtagtcgccgccgacgcgttcgacgaagggcaggttcagcagggcggcgtcccggcgctgaactacacggccgacggcacgggctacttcaccatgcccgagggtgcgaccacgctcacgacccgcttcgagggcacgcaccccgaccgcggcgtcatcgtcagggaggccagattcgaaggcgtgcagaccggcggcaaatacagcgtctccttccggttctcgaaagacctgccgggcttcatcgaatgcttcgtcgtcaaggtggacacctcgaccgacgactacgacgacacgttcccgttcagccccgagccgagcatcgaaagcgacggtttcgacatggaccagccgcaggatttcatccccgggacaacctccccgaaacgttacatgataaccacgatggccgccgtaaagagcgtcgtgataggcatcggcgacgacagctacgaagcgctgaacggcacgaccgagggcgtcgaggtgaccagggagagcgacttgagcctgacggtcaccctttccgacgccttcttcgcagggcgtccgggcggcagccatccggtgagcatccgcgtcacggattcggccggcgccgaagccaccgccatctcggaataccgtctgcaaggccttctgcccattgaaaagacggattacgacctctggacgaacagcctcacgctgcgcgcgctggtcctcgatccgaacgtcacgacggcgaccttcgggctgcgcgtcaaagacggcgagtggtccgacgccgagggcgtaaacgccggcgagggcatttatacggccacgttcacggcccaatggaaggaatcggtcaatgccgcgggcctgaccgtccacacccccgtcgcaggcaccggcgtcttcgccggcaacagctacgaggcgcgggcggcgctcgatggcgaaaccgtctcctcggcagagtttcaggccgctgccgggcaggtcatccccgacggggatatggaaagcggatcactcccctgtttcggcaaaagcacgtcggaatccacgacgttctggggcagcggcaatgccgcaacttcgagactgtgtgcgcagtcgaccaaacccggcatgggcggcagctactgcgccaagctcgaatcgcagccggcgttcggcctgctcgccgcgggcaatctcttctcggcaacgttccgttttgcgagtctctcgggaacggccagtttcggaatgccctaccagtggacagcgcgtccgacggccttgcggctcaaataccacgccaccgtgggcgccgtcaataagggaaccgtcaccgaagagcacgaatacattcaggacggccaagaccgttcgcgtatcttcgccgttatcgtcgattggaacagccgtcacgcgactgtcgccggcatggggtcgccgacaggcgtgtgggaccccgccaaaaccgccgaaaccgccgaaggccccgtcatcgcctacggatcgctgctgatcggcgaaaccacaccaggcgacgcgatgacgaccgtggagattccgatcgaatattacgacagaacgaccaaacctacgggtgcatatacactcgtcatctcctgtacgacgagcgcctacggcgacttcaaggtcggttgtctgggcaatgtcatgtacgtagacgatttcgaatgggtatactaatcactaaacgcaagcagatgcgcaagctattcatccgcacgctcgccctcgcgctgtgcctcacgggcacggcgcaggcgctgcgcgcacaggaaacaaccgccgcccaaactgcggcggcagccgaccagcgtccgaaaacaatcaacgaaatgcgccaggagcgcggacttaccgacacgcacaacctgttcgtgccgaaaggacagtggattttcggcggtacggcctcctactcgacccataccaacaaaggctatcagttcctcgtcatcgagggaatcaactcgaaaggctacaccttccgcgtcagcccgatgatcgcctacgccttccgggacaacatggccctcggaggacgcttcatctattcgcgcacgctgctcaagctggacaacgccgaactgcatttcggcaacgaggagacgggcacgaacatcgtggccagggatttctactcgctcaagcagacctattcggcggcggcgatctggcggcagtacatcccgctgggacgcaacaaacgcttcgcgctgttcaacgagatgtcgctcgcggccggaggcacgcaggcgcgcttcgccaacgactcgcccgtgaagggaacctacgaaaccggctacaccctctcgctgggcatttcgccgggcatcgtagccttcgccaccaacaacatggccgtcgaagtgaacgtgggcgtgatgggcatcagctatacccataccaaacaggttcacaatcaggtcaccgtgggcaaacgcaacacgagcatgatgaacttcaaggtcaatatcttctcgatcggcctcggcatggccttctatctctaaaaacggcacactatgacacgaagcatactctgcaccctgctgatcataattatctcgtgcggcaacgcgctggcgcggcaaaccgccgcaaccgggaatccgaaggaaacagccgctccggcagccgcaatcgcacccgccgcagccggaacgatctccaccgaagaagaagccccggcaaccggaaatgcgccggccgccgaagcgccggcctcggaagcggcagtcccggccgacggacagaagcaattgcaggcactcaaggccgcggaagttcagtcgccgatccgcggcaaaaaacagttcctgcccacacgccggcgtatcgaccgcgaaatcaacaagctcaagttcgcctacaagggcgaggtgatcatgggtctgacggcctcctacggcacgatgtcgagcgacgacacggacatcatgctcatcctcgacggcatcgacgccgacggcacggtggccaccgtcaaacccttcatcggctatttctaccgcgacaacaactgtctgggcgtgcgtttcggctaccgccacatggacggcaacctcgatgccgcacgctacgacctgggcgaaagcaacgacgcctcgggcagcattccgaaggtcaatttcaacagcgacaactactcgttcggcattttccaccgctcctacgcgggactcgacccgaagggccgtttcggactgttcgccgagttcgaactctcgctgtcgaccggaacgtcgaaactctcctaccagcccgacaccgccagcgacaacatgaaaaccacgttcagcgacaatacgcagctcaaattggcgtttaatccgggagctgccgtctatatcttccccaacgtctgcgccacgctgtcgttcgggctgggcggcatccagtacacctccgtcacgcagaaggacgacgccggcaacaagatcggaacgcgcaaggcttcgaacatgcgtttcaggctcaacgtcgccgccatcaacttcggcatgacggtacacctgtgggacaagaaaaagaaataaattatgaccagatacctgaaaacagcactccttgcagccgcggcgctcctcgcgtcgtgcatccacaacgacatcccctatccggtcgtcgaactccgcatcgcgagcgtcgaaggccagggcttctcggtctcggaaaacaacgtcacgtcgcggacagtcaccctctcgctcgacgaagcgaccgacatccgcaacgtgcggatcgacgccgtgggttacgacgccgtcatccacagcatccagctcgacaaggaggaggtcctgcaacagatccgcagctcccgggagctgaccggcacgttcgacctgcgttcgccgatctacaccacgctttcgctctaccaggattacgaatggacgatccgcgccacacagaccatcgagcgccgtttcagcgtgacggggcagatcggcgccacggagatcgaggagaaaaaccgcatcgcccgggtcctcgtccccagcgacaccgatctggcacatatcgaggtcacggaactcaaactcggccccgccgacatcacgacctattcgccctcgctcgaagagctttcgggcagcagcttcgaatcggtgcgtttcgtagacgtcacctgccacggaatcaccgaacggtggctgctttacgtggagcctaccaatgtgaaggtcgccctccgggcaaccgacctgtggaacaatacggccacggccaccgctctcgtctctgccgaggagtatgcggccggcgccgcgctggaataccggatcaagggcgccacggagtggcagagaatggcggagagcagctacgaggccggcatcctgacggcaacgctcgcgcccgaatggagctcgtcgaccaacccctacgggcttgccgtctacaacttcgtgccggacaagggtctcttcgcagggcacacctacgaattccgcctgacagtcgggggcgagcagacccagctgatggaatatgcggcccccgcgggcaacacgattcccaacggcgacctggaggacagctcgctgagctgctggacccagaacaacaagaccgcagagttctggggcagcggcaacaacaccttcaccaggggactctgcacgcaggcctccttcgacggaggcacgcgcgccaaactccaggctacgtccgccgtgggagtcctcgcttcgggcaacctcttctcggggctgttccagaaggacgtcttgacccggggtgtcgtgtcgttcggccagccttacgcctggaaagcccgccccaaggcgctgaaactgcaatactatgcggaacatatcggcattgccgacatcgacaagaatttcggcgccccgattcacgaaggagaccgggacaaggcccgcatcatggtcgccatcgtggactggaacacccgccgcgaggtcggatcgggcacggaagcccccaccgggacctgggatccggaagagaccacttcggtcgacgagggaccgatcatcgcctacggctcgcttttcatcgaccaaagttcgaccggcggcaagatgatcgacgtacagcttccgctcaactattacgacacgaaggccaaaccctccggattgtaccagatcgtgatctcctgctcgacgagcgcctacggcgacttcatggcaggctgcaagtcgaacatactctacgtcgacaatttcgagtgggtctattgacaatgcctattttcgcaacccgcaaaaagcagagcctcaccggttctgctttttgtttactccggcggtccgaaaaaaaacaccggaggaggtagggtttcagcgctttcatccgtgatatagatagaatgaagagacccgaacatatcatcgaagatctgataacccgccaactggacggcacacccctcaccgacacggaacgccgggaactgcaggagtggctcgaagcatccgaagccaaccgcgacgcctttctccgggcttacaaagcctggggaaacgcccgccttgcggaaacccggttcaacaccgggcaagccctcgaaaacgtcatggcccggattgccgaagcatccagaccccggtctttcctgcggccgcaactgcgccgtctgggcatcggcatcgctgcggcagcctgcgtcatgctggccgttgtcggttactaccgactgcaaccgtcgaccgtcccggacatcgaaatgtttatccggcaggccgacacccccgtattcacccagaaagaggtgcaactggtgctgtccgagcagaaaaccctcctgctcgaaacccaaaaatcgacaatccgttacgattcgaccgccatccggatcaacaacgccgaaaaaaccattcccaaaaaagaggctgcgacgttcaaccagctggtcgttccctacggcaagcagacgacactgacgctcgccgacggaacccgcgtctggatcaacgccggatcacggctggtctaccccgtcgtattcgaaaagcagaagcgcgaaatatacgtcgaaggcgaaatctacatggaagtggcgcacgatgccgaacggcctttctcggtacacacaggcaagatggatgtctgcgttttgggaaccaaattctacatatcctcctacggccgcgatcgcacgcaggaggtcgtcctgctctccggctccgtcagcgtagcccctgccggacgatccgaccgcggaattcgcatcgttcccggccaacaagccatcctcggcacctcggaatcgctggaggtccgcgaagtggaagccgaaagctacatcagttggattcacggatacctgcccttcgacaacgacccgctgtcgaacatcctcgaacgcctttcccgctactacaattgtcggatcgagtgtacgcccgaagccgaagcgctgacgctctcgggcaaactcgaactcaaagacgatccggccgaagtgctgaaaatcttgagcgcaacagcccccatcaacctgcaaatcaccggatccgggaatttccgaatcgactataacccgactaccaacaacccaaactgacctgcctatgtaacagcccgtatccctccaaaaaaagaccggatgtcgtccctcaacgacatccggagcgattgaaaatctaaaatagccttttaaacttcaaatctttacaaatgtacaacaaaaatggtaaaatcggtctttttaaggccgataatgggggattattccacctattccggataacattcctgtttttgctggcaacaatcgggttcatccggcccgtcagtgcacaaacggcagaggcggcgaaaaccatcacgctcaacgtacagaaccgccccatcaaggaggtcctcacactgatcgaacgccaaagcgactacatcttcgtttactacgacaacatcttggacatccaccgcaaagtcaccctgaaagtaacgaatcagcccatttcggctgtcctgaaacagttgttcgccggaaccgacaacacctggaaactctcgggaaggcagatcgtcatcggacgctccgtagctgcggccgcagctacaccccggaagatcacacgcatcacaggcgtcgtcagggaccagaacaacgatccgctcatcggcgtcacgatccgcatcaaggcccgtccgaacatcggtacagccaccgacatcaacggcaaatacctgctcgacgtttatcccgacgaagtactggaattcagctatgtaggttacaaatcgcaggacgtttcggtcgcagggcaggaaatcgtcgacgtggttatgctgcaaaacgacgccatcctcgacgccgtggaggtggtgggctacggcgtgcagaaaaagatcagcgtcatcggctcgcagcagaccatagcgaccaaggaactgaaagttcccgtcgccaacctcacacaaggccttgcgggccgcgtatcgggcctggtctcggtacagcgaaccagtgaaccgggcttcgacgacgcgaacatctacatccgcggcatctcaacgctgacagccagcatgagcgcccctctgacgcttgtcgacggcgttccccgctcgttctccaacgtcgaccccgaagacatcgagagtttctcgatcctgaaggacgcctctgcaactgctgtttacggcgttcgcggcgccaacggcgtcattatcatcaataccaaaagcggtctgaaaggacgccccaaattcagcgtacgctataccgaaggcctcaccaaaccgaccaagatcaccgatttcgccgacggcgcgacttacatggagatgtcgaacgaagcgtcgctcacccgcggcggcggcaaactatacagccaggagatcattgataagacccgccgcggggaagacccctatctctatcccgacgtagactggatgaaacagatcctgcgtaacttcagccgcaaccgctcggccaacgtcaacgtgcagggcggttccgacaaggcggtctactacatcggcctggcctactacgacgagaacggcatgtacaaggacacgaaactggccgactacaactcgaacaccttctaccgccgttacaacgtcacctcgaacctcacgctcaacccgttccgcaccaccgaaatcaaactgggcatccagggctacctggccaacgccaactatccggcatcttcgcaggcaagcatcttcgaatcggcctatttcacacctccgacctatatcgcgccgctctaccccgacggcaagctcggcgccttctcgggcggcgatataaaccccgtggcacagctcggcgcaacgggctatgccaaccagtggcgcagccaggtttattcgaacctgcgcatcacgcagcagatttacaaagggctctcggtttcaggcatgttctcgttcgacacctacaactacacgagcaaccgtttcaccaaaaccccgaacacctaccacgccacaggacgcgacgccaacggcaacctgctctacgagcaaacccgccagggaaccgaaaacctggcctacagcctcagtgcaaagggtaaccgcgccatctatctggaagccgcagtcaactaccgcaacactttcggcaggcacaccgtatcgggcatgatgctctttaaccagagcgacgaaatcaataccaaagccaccaacgtcgaagaggcgctgccctaccgtttccgcggcctggcaggacgtttcacctactcgttcgacgaccgttatttcggggagttcaacttcggatacaacggttcggagaacttcgccccgaaaaaccgttacggcttctttccgtcggtcggacttggctgggtaatcagcaacgaacccttcttcagaggcgccacagaggtgatccagtacctcaaactgcgcggcacatggggtcgtgtcggcaacagccagatcagcggacgccgtttcgcctacctggctacggtcaaggacaccaacgacaccagttaccagttcggaaagaacatggaccagacctacgggactacggccatcgacgaatatgccgtcgacgtaacgtgggagatcgccgacaaaaccaacatcggactggacatgcgcctgctgaacaacaagttcaacctgcaattcgacgccttcaaggagtcgcgcaaaggcatttacctgcgccgcacaagcattccgtcctatttcggtatgatcaacaacccctacggcaacatcggcaaagtcgagaacaaaggtatcgaaatgtcggtcagctatgccaattcgtggcgggactggtcgttgagcgtcatgggtaactactcgttcaaccgaaacaaggtcctcgaagacgacagcaccgtggcctatccctggcagaaaaccatcggcaacaaggtcgaccagcggttcgggctcatcgcactgggactcttcgaaagtccggaggagatcgccgcagcgcctgtacaggtcggcgacacgcgcccgggcgacatccgctacaaggacatcaacggcgacggcaaaatcgacgaatatgacaaagtgcccatcggctggggaagtgtccccgaaatcgtctacggcttcggattctccgtaggctggaaaggcctctcgctgtcggccatgttccagggcgccgcacacgtcgacgcgatcctcagcggcgaaggcgtactgcctttcgcacagggatcgagccgcggcaacctgctgagcaacatcaccgaccgttggaccgaggccaatccccgccaggatgtcttctacccgcgcctctcgatcggcaacatgaacatgaactacgaagccagcacgtggtggctcaaaaataccagctacctgcgtctgaaaaacatcgaactctcctatacgctccccgaccgctggatgaaacgcatccacatcaacaatgcgcgcatcttcatacagggcgtcaatctgcttacattcagcaaattcaaactgtgggacgtggaactgggcgacggccgcggcgcaaaatatcccaacatcggttccgtcagcctgggtatcaatttcaacttctaaaatccccgacaagctatgaaacttaaaacaatactcactttactggccgccctcggcatcctgaccgcctgcaacgacgacttcttcgaccaggttcccgacgaccggatcaccatcgagcaggtattccagcgcacctcctactccgagaaatacctggctaccgtttacagctacatccgcgacgagtcgcaccgcaccaacggcgtgccctgggacccgtgttcggacgacctggacgttacctacgaccgcgaggattacaactccttcaagatgaacctcggcaactggagcgcatcgtcgaactactacgagtactggtcgcactactaccggggcatccgctcggcaacctacttcatccagcacatcggctcgaaccaggagatgctcgacgatcctacgcgcggcccgatcgtcgtcgaacaatacaagaacgaagcccgcttcctgcgtgcctggttctattactgcctgctgcgccagtacggtccgtgcgtactgctgggcgacgaagtccttccgggcgacctcgaccgcgacgatgtgaagatgaacctgccgcgcagttcctacgacgagtgcgtggattacatcgtcggcgaactggacgacatgatcgacaacaaccgcctgccgctgcacttcaccgtgcaggccgacaaggattacggccgggcgacactggccatgtgcatgggactcaaaagccgcgtactgctgctggccgccagcgaccagttcaacggcaacccggcctacgccaacgtggtcaacacggacggcaaacaccttttttcgacccgaaaagaccccgaaaagtggaacaaggccgcccaggctgcaaaagatgtcatcgacctgggaattttcgacctctacaaggagtaccacaccgacggaacgctcgacccttacctgtcctgccgcaacgttttcctggagaactggaacagcgaggtgatgatggtccgcatcagcaactacctcaaacattgggaacggtcggcttcaccccggcagttcagcggctatgaaagcatgggggcgacccagcaactggtcgacgctttccgcatgaaagacggcacggccattaccccggacaaggagagcggctattcgaaggcgaactactccgaccccaaatcgggctgggtattcgctcccgccggtacgcgcaacatgttcgtcaatcgtgaaccgcgtttctacgtcaacatctgcttcaacggcgcctactggatcggcgatcagaaaacccgcatccagctctactacaccggaggatcgggaaagaaaggcacgtgggacttcccgcgttcgggatacatcgccatcaaaaacgtttcgccctcgtccaatcccaagaacggcaactacatcaagcgtcccttcgtcatcatgcgttacgccgagatactgctcaactacgtcgaggcgctcaacgaatacgatcccgggaatgcggacatcgaaacctacctgaacaaaatccgcgagcgcggcggcctgggaccggtccaaagcgatctcaaccagagtcaaatgcgcgagcagatccggctggaacgccgcatcgaactctgcttcgagcaactgcgctatttcgacacccgccgctggctgatcgccgaccagaccgacggaggacccttctacggcatgaacgtcgacgcaggcaacagcttcaccgacgaggcgttctacgagaaaaccgtattcgaaacccgcgtgttccggcccgagttctaccttttccccattccccagtccgaaatcaaccgcgatccgcagatcgtccagaatcccggatggtaaccgtaaaaacgaataacgactatgaaacttacgaaatacctggctgtcctctgctgcggaacgctcttcgcagcctgcgaaaacccgattcaggacgacctgaacgtggacaaccccgagaactatacgcgtatttacacggtcaacgccgtcgacgacgcctccaagaacacactctcattcccgctcgaacgcgacacgtcgctcatggtctacgccaacttgagcggaatccgcaacccgggatgcgatgtgacggtcaaatttcgcgtcgcccccgaactggtggatacctacaatcagaagcaccagagcaactacccgatgatgcttgatggaagctacacgatcgagaacctcgaagccgtgattcctaacgggaaatacatctcctcgcccatccggatcgccatcaacagccaggcgttcgacggcgtgggcgtcttcctgctgccggtacggatcgagaatgtgacacccgacctggccgtcaacgaatcgttgcagacggcttacctgcgcatcaacggctactacaccgaaaatccgttcccgagatacgacaggagcggctggtcgatcgccgggttctcgacgcaggaggctgaagcgacatcaacctaccccaaccgcggattggccgtttcgatcatcgacggcgaaaacaacacctattggggtacgcagtggcgcaacgccaaacccggcccgccgcactggatcgccgtcgacatgggcgcacccaaggaactgcacggactcacaatccgcggacggtctgacaaagaaggctccgacgttcccaagagcagcggcaacccgcgtatcttcaacatcgacgtgagcgacgacaaccaaaactggacccatgcagggacctttaccgtcgaaaaccggatcgagaacacggtatacctcgaccacaaggcaacggggcgctatttccgtatcttcgtcaccgccacgcaggccgacctctaccagacctgcatcgccgaagtatgggcattctgatccgactaacaaatttttaaaccaaacaaaagactatgaaaaagactatatgtctgtgggcgctgctcctgattgtcgtttcatgcaccaacgacgacaattacaacgacgagcacggagacaaggcagtcattccacccaaaggcaggatcatccgcataatgacctacaacatttacggcgcacgcgccacaagccccgccaatgcagccgatctggacgcgctggccgaggtaatccgccggcaggaccccgacttcgtaaccctcaacgaggtggatgtcttcaccaaccgcacgggaaaagacgtacaccaggcccgcgacctggcagccaaactcggtatggagtggcacttctcgaaagccatcgaccgcgacggaggcgaatacggcgacgccgtgctgtcgaaacacccgattatagagacccgcagttaccggctcccctgcgccgcttcgcaaccgggcgaggaccgttcgctgtgcgtcatccgcgtcgagatcgacggcaaagacctctatgtcgcctcgacgcacctcgatcatctttcgggcgatgcgagccgcctggtgcaggccaatgagatccgccgtatccgcgacacggaactggacggagacctcatccttgcgggcgacctcaacgccattcccagttcgaacgtcatcgccacgatgaccgcgttcctgaccaatgtcggaacgatcgaccaatacactttcccgtcggagaatcccacccgcaagatcgactacatactgtatgccccgatcggacacttcggcgtacagaactgcacagtggtttcgcgcagcgaccagcaggtcgacggcgtcgacgcctcggaccaccgccccgtcgtggccgacatccggttccagaccgaggaagacctcccggagaatcaggaataaagcgttcggaagatgaaaaaactgctattcacactcctcgggctggcagcggcactgacgctgccggcccaggatttcaagatcacgcatggcccgtggctgtgcgacatgaccgaagacggcgtaaccgtcctgtggactaccaacaaacccgctttgtcatgggtcgaggcaaccgaggacgacggacgcagtttctacgccgccgaacatacccgccattacgaaaccgtcgcgggccgcaaacaggcgcacaagacactgcacgccgtgcggctgaacaacctgcgtcccggaacgaaatactgctaccgcatcttctcgcaggaggtactcgaatggaaacacggagacaacgtcctctacggcaggaccgttgccagcaatgtctacaaacgcgcgccgttccggttccggacattcccggcaacgggaaccgactgttcgttcgtcatcctgaacgacatccacggacgcgccgacgacatgaccgaactgtgccgggaaatcaatttcggcaaacacgacttcgtaatgctcaacggcgacatgtccagcagcattgaaaatgaggagcagttgttccgggatttcatcgacgcctcggtaaacctttacgcctcggagaccccgatactctacaaccgcggcaaccatgagacgcgcggcgtcttcgccgaccgtctgcacgactatttcccgacgcgtaacggccgccactaccaactctgcaaagtcggatcggtctgtttcttgctgctcgactgcggcgaagacaagcctgacacggacatcgaatacggagggcttgccgactacgacgcctatcgccgcgaagagtgcgaatggctccgcagggcggtggcctccgaaaccttccgcaacgcctcggcacgcgtcgtcttcctccatattccgctcgacggcggaacgtggcacggcagcaaccacctccggaatctgttcctgccgatcctcaacgaggccggcatcaatatcatgttctccggccacacgcaccgctacggcttccacccggcaaacgacgaagttcggttcccggtcgtggtcaacggcaatcaaagctacatacggtgcgacatgacgggcgaccgaatcgcgatccgaatcgtcggtcccggcggacgcgtcgcacacacacacgaattcccactccgctaacgaggcggaaaaaacaatgccctgcaccgaaacggtgcagggcatcttctgtttttcagaggaaaagccgcagaaatccgctgcggctgagccggagccgaagctgggagagcgccgccccaatatgcttttcgacggtcttgacgctgatgttgagccgctcggcgatctcccggtttttcaggcctgtcgtgcggctcaacaggaacacctggcggcactgctcggaaagtcccgaaatgcagcagtcgatctcctcgctcaactgcgataactggaactcctcttcgatatggtcggcgacaagcgtacgaatacagacatccaactcgtccagtccggattcccccccccgccattttttggagcgcagcaaatctatggcacgattcttcacggcgacaaacagcagcggcagcagcggccggtcgaagtccacctcctcccgccgttcccacaaggcaagaaagacatcctgcacgatgtcttccgacgccttgcggtcatggaccatctgaaaagcccgtgcacacaagggttcatagtgatcgcggaatagttgctgaaaatacgccgaatggttttccacagttttctcaaaatatgtcggaatactccgaatcattcaaatatagcgataattcgggaaattgcaaaatttggactgccgccaactatcttcgtcttcgagtagattccacaccgcagggcatcctgtccccgctgcgcggggcacaggcacaaaaaaggcaggaccgctcttgcgggtcctgcctttaatttatcctgccgccgtcaccttccggcgatgcggcagtatctgtcgtagcgtcctatcacgtcgttcacataggccagcgtctgccggctgccggtgaatcgtccgcatctgaccacttcgttctcgtagaattccggctcggccttcagcgtaaggtaccgggccacgacctcccacgagttggggttctctccgttcaggcgggccagacggcgggcgtcgttcacatggccgataccgctgttatacgaggccaggatgatgctcatgcggtctttttcaggtgtcccttccggaaaacggagcgacgacatgatcttcgacatcagtttgttggccaaccagatattggtcctcggatcagtgatctcggccgcggggacgtcgaactgacgcgccaccgaaggcatgatctgcatcaggccgcgggccccgctgcgcgaggtgatgtcgggcgtgaagcgcgattcgtggtaggcgatggcgctcatcaggcgccagtcgtggccctcctcttcgctgatgttgcgaatcagattgtcgtaggccgaaatgacgtaactgccctcggggagcagcgagtggtgcatctcggccagtgcgttcagtgcgtcgtccgtcgcgggtgcgctgaactgggcgttgaagccgtaaaatgtcgtaagaatggttaagaacgcaaacgttaatacggtcttttttaacataaaatgttgttttgcgggcagcttacaccgcacagaacagcacgtcaatcatagaatccccatgagataccgattttgaacatgcccggattgagcggatagcgagccgccgagaaatattctccgttaccgaacagtcccttgttcacatgctgatatttcaggaatatccgcattctcttccactttcccatgacgaaagcgtccatataggggtaattccccgtctcgacctcccgttggttgtaatacaccgacagagccggattgtaaccgggcgcataatacttggtattatagcgtccgtccagaccgatctgcaggcgcagcacatcgcgcacgacccagaattcgtagtaatacgacaggaaggcgctcaaaagcggaacgggtacaacatcttgatccgtgctccactgcaacaataccctgttgtccaaatgaagtccgcctaaacggaaatctttgcgagcatacacactcgtgaggctgacgttgccgctgtgctgggcgacgttgctgtccgacgcatagtaaatcttgtcggagacgactccctgccatgcccccgcttcgaacgcgaaatcgggaaccgaaaacttgacctcgaaccgagtttcattctccttgcttaaaggagtgttccatatataatggttagagaacagattctcctgccagtaggtcggcgagcggcggtccatcgagaaccggccttcgagaatcagggggtgtccgcgcagatagcctttcagcgcgaggtgcgcgccgatcgagagatctccgcctctgtatcccgacgggtagaaacggaggtttccgtcccagtcgacatatttctttatctttccgctgacggagccgtaaaagaagtaactcgtcttgttgaccttcgtgtacttccccgtcaggtaatctttcagttcgaattgcgagtaggtgtgcatgtcgatgccgatgccggcgtcgagcgtccccacgattccgttccggtcccagggctgcgcctgcacgaagaagcggttcgaaatgttccgctcgtagatcgagtcacgcgtctccgcagggttgatgaaccagttatcgtaataatgccccttcgcggagacgaaatcgccgttctcgtcccggtggtcccgttcattcgtataaggctcgttcctgtcggtgtagaccttgctccacgaactgtactcgaacgaatggccgatatacaccgccgagaggttcgccatcgagaaatcgctctccgtgagccgttgcagcgggatgccgtaggactgcgtgacgaagaaggcgttgttgcggtagaggttcctggcctcggcgtcggccagccgcatcggcacgcccgaaggcatctcgaacgtcgtgtccgcaatggcccactcgccgaccacgccgccgttctcctgctgctcgatgtggttgttgtagtagcccgcatggaccgaataccgcctgcccgtgtggctgacggccaccgcaaggttgtggttcttggtccgcgaccagacgtactggccgcgcgtgccccgcgccttgtagtcgatgttgaaacccgtcgtcggagagatgttctgcgcatgcatgatgccgaaattctcctcacggaaacgcttctgccccgactccgcgtaattcatccggatcatcggcttcttcgtgttgtagaagggcacgttctccatgttgtaggtgtacgcgtagtagggactcgcaaaactgaagtcaaagaactgcggacgccggaaatagttcaacggcagcgacgtctggcccaaagccccctgggcgatgtcgcccacgtcctcccggtagaacggatagtcgatccggtaatcggtcagcgtggtgtccaaaggcccgatctcgacgcggttgaaatcgcggctcacgtgccatttgaagttgttcagcgcgcggatcgagtcattgaaaaaataggactcgagcggcttgcggattttccgttccttcttggtggtgtcctgcggctgctggttctcgccctcctcgccttcggtctgctcgtagggattgctgccgtagaggttacccgtctggccgttgcgctgcgcgcgctgcaaggtcttcgcatcgaagccctgggagcgcaccgcctcgggcgctgcaaaaaacagaccgagcaggagcgtcagcaatatgcggttcgaaaatctcgacatgtcagccaaagagcggaaatccgcggcaaatgtaattaaaaaattttaaatatacaactattcggctttcccacagccttttgtccggcaggcaagcccccgcaccagcgaaacgaggatatacagcacgatgatcgccggcacggcgtaaccgcgcaggaggacggccgtcacgacggccgcgatgatgaatccgtagcgcagttcgttccctttccagccgaagccgtggaatttaagggcgaacatcctcacattcgagatcatcagcagtcccacgaccacggcaatggcagaaatcgcctcgcgcggaagttccagtccgctggtctcgaacaacagccccagcgaaccgcagagcatcgccgccgccgggctgggcagtccgcagaactccgtgcgctgcgtgtcgtcgatattgaatttcgccagccgcaacgcggcgcaggccgtaaagacgaaaacgaccagccccggatacccttcgggcagccagatgccgggcatccattgatagagcgaatacatgatcgccgccggggccagtccgaatgagatgtcgtcggccagcgaatcgagttgcagcccgatgggcgaactctggttgagcagacgcgctgcgaagccgtcgaaaaagtcgaacacggcggccagaaccatcaggccgaaggccagcttcaggtcgccccaaaccagcgccgaaaccaccgccgccgaaccgcagaacaggttcgacagagtcagcagattgggtatcgtgaagagtttgattttcattgccggggcgaaaatttaattttccaataggcggcaaagttactaaaatatttttatctttgtcgaaattaactccatataataactcatgtcaagcaataaatattgtgtcatcatggcgggcggcatcgggacgcgcttctggcccaagagccggcagtcgatgcccaagcagttcctcgacattctcgggacgggcaaatccttcatccgccacacctacgaacgcttcgcaaaaatggttcctgcggagaatttcctcgtggtgaccaacgataaatacaagagcctggttctcgaacacatcccggaaatcggcgaaaaacaggtgctctgcgaacccgtgggccgcaacacggccccctgcgtggcctatgcggcctacacgctgctgaaacgcaatcccgatgccgaaatgatcgtcaccccggcggatcacctgatcctcaacgaagacgacttccgggcgatcatcgccgagtgtctcgacttcgcctcggagcacgacgcgctgatgaccgtgggcatcaaacccacgcgtcccgacacgggctacggctacatccaggtctcggacgacaagcccatcagcaaggtcaagtgcttcaccgagaagcccgacatcgaactggcgcgggtgttcctgcaatccggtgagttttactggaattcgggcatcttcgtgtggaaggtgcgctcgatcgtcgaggccttcgagaaatacctccccgagcaccacgcgctcttcagcggcgtgatgcgcgccatcggaaccgacgccgagcgcaacgtcgtggagatcgccttttcggagtgccgcgccatctcgatcgactacggcatcatggagaaggccgacaacgtctacgtccgctgcggcgagttcggctggagcgacgtcgggacgtggggttcggtctaccagcattcgcgcaaggaccgctatgccaacgccgtgcccgaagagggctgttacctctacgatacacgcagttcgatcgtttcgctcccaaaggacaagatcgccgtgatcagcggactgaaggagtacatcgtcgtcgacacggacgacgtgctgatggtctgcccccgctccgaggagcagaacatcaaaaaattcatcgacgaagtcaagttccacaacggcgacaagcacatctgattcgttggatcagatgtgcttgatgaaatcattccagaccttatgatttccatcgcccgtcactgtgcattccaacgttcgcatccacggcgttccgccgtgtttgcgagtctgctcctcctccaaatcccctccccggaggggacttatcgcatgtgaccgaataatctcaaaacaatacttgccaacatcttccatgagcgaactatacgaacttttcagccagcacccccgtatctcgaccgacacgcgccggatcgagccggactccatcttcttcgccctgcggggcgataccttcgacggcaaccgtttcgtcgccgaagcgctcgaaaaaggcgcggcctacgccgtctccgacgatccgcaggtcgccgcttccgacgagcggcagcgcatcgtgctcgtcgacgacacgctgaaagccttgcaggaccttgcccgctgccaccgccgggcgctcggaatcccgatcctcgccatctcgggcagcaacggcaaaaccaccacgaaagagcttgtcagccgcgtgctggccgagcggttcgaggtctacgccacccgcggcaacctcaacaaccacatcggcgtgccgctgacgctgctcgccatgacccgcgacacggagttcggcgtggtggagatgggcgcgagcgcctgcggcgaactggctctgctggcatcggtcgccgagccgaactacggcatcctgaccaacatcggcctggcgcacctcgaaggcttcggcggaccggagggggttcgccgcggcaagggcgaactgttcgacttcctcgcggcgaacggaggccacgccttcgttccggccgacgacgaaatcctgacgggcatggccgccgaacgcgattcgctggccgccgaatattactccgcatcgctggccgacggcatcgaaaaccatctggaaggcagctacaaccggttcaacatcgcggccgccgtcgccgtgggacactatttcgacgttcccgacgaacgcatccgccacgccatcgccagctatgttcccgacaacaaccgctcgcagcgcatcggaacgtcccgcaacacgctcgtcgccgactgctacaacgccaacccgtcgagcatgcgggcttcggtcgggaattttctcgccgagccgctcgaagagcgtcagcgccgggtgctgattctgggcgacatgctcgaactgggcgactggtccgaacgcgaacacgccgcaatcatcgagatggccgcacaggaccccgaagcggaactgctgctcgtaggtccggaattcgccaaggcctacgacggactcgcggaaaagccggccaacgtcacgctctgccccacgcgcgacgacctgatctcgctgctgaaagtctcccccgtggagcactccctcgtgctggtcaaaggttcgcacggcatggggctggagcaggcgctggaggcgctctgatcgtccccggaaaccgccccggagactgcacccggagactgcacccggaaccgcacccggaaccgcacccgaaaacaaccgaaacaaaccgacccaaaataaacggaccatgaaaaaactactcgcaactctccccctgctggcactgctctcctgcaccggcatccccccgcagcatgctctctcgcatttcgactggacggaacccgccgatccgcagggagagaaacccgaaacctggaacggagtcgaaaaaccgatcgtcacgtttggctcgacggatgtccgctatccccgcgcgacaccctgcgcagcagccgtgacggatcaaacgaccctcacgggctggcgcggcgagaaggtctcggcccaggctgtcatctccgctcccgcggctgtcggcggcctgacctgcaccgtgggcgacttcgtcgcggacaacggcgcgaagctccccggcatcgcctgcgcacgcttcgtcaaatacgtcgtcagcgaccgctttctgaccgaccaaccctgcggcgcacggccggagaacaacccggcgcacctcgaagcggacctgctcgacgaggcggcttcatgcgacgtgcccgcccggtcgacccgtcccgtctggatcacggtagatatcccgcgcgacgccacccccggccgctacacggctccggttgcggtaaagggcgaaggcgtcgccgaaacgctgacgctgcacctgaacgtcacggaacgcaccctgcccgcgccctcggagtggacctaccacctcgacttgtggcagcatccggcggccgtggcccgcgccgaaggggtagaggtctggagcgacgagcatttcgaacggatgcggccgacgatgcggcaactcgcagacgccgggcagaaagtcatcacggcaacgctcaacaaggacccctggaacaaccagtgctacgacgcctacgccgatatgatcgtctggacgcgcctggccgacggcacgtgggagtatgacttcacggtcttcgaccgctgggtgcggttcatgctcgacctgggcgtcggcaagtacgtcaactgctattcgatgctgccgtggaacaacatgctccactacaaggatgccgtgacgggcgaattcgtcgacgtcaaggccgatccgggcacgccggccttccgcgaaatgtggggcccgttcctgcccgccttcgtcggtcacctccgcgaaaaaggatggctcggcatcaccaacatcgctatggacgagcgttcgcccgaggtgatggccgccgcgaccgccctgctgaaggaggtcgcgcccgaactgggcatcgcattggccgacaaccacaagatcttcaaacagtatccctacatcaaggacatgtgcgccagcatcttcggcccgatcgaacagacggacatcgtccagcgccgcagcaaggggctgacgaccaccttctacgtctgctgttcgtcgggattcccgaacacctacacctcgtcggcgccggccgaggcgacctatttgagctggtacgccgccgccgaggattacgacggattcctgcgctgggcctacaactcgtgggtcgaggacccgatccgcgactcgcggttccggaaatgggccgccggcgacacctacctcgtctatcccgaaggccgctcgtcgatccgtttcgaacgcctcgtcgaaggcatccaggactgggagaaaatccggttgctgaaaacggaattcagcggcgacgatgcgaaactgcaaaccctccacgacctgctggagccgttccgttcgtcggtcgccttcgacggttgggagcagaccctgcgcaatgcccgcgcgacgctgaatacgctctgatccgccggacggtccgcaatacggcataaaaagaggtcacgacaacccgattttcagacaggttgccgggacttttcgtgcattcttgcgaaaaaatcgttatttttgtccgatttaactcataaaccccaaacgatgactctcaacgaataccagcagcacgccctcgaaacggcgatctaccccgacgaccgccgcatcatctaccccacgctcggacttacgggcgaagcgggcgaagtggccgacaaggtcaaaaaagtgatccgcgacgcccacgaggagttcacccccgagaagaaactcgaaatcgtcaaggagatcggcgacgtcatgtggtactgcgccaccctcgcccgcgacctgggctacgaactggacgacgtggcgcagatgaacgtagacaaactccgctcgcgcatgcagcgcaaccacctgacgggcagcggcgacaaccgctaatcgttcggcaaaaccgaacgattgcaattcaaaattcaaaattcagaattcaaaattcataatcatacatggaacccgaaaaaatccaaacttcgctgcccgaaaacgcctaccgcgaactcaagccgggcgaagagtacacgcccgtgatgccggcttcgtccaacccgaaggaggtgacgccctactcggtcacgatgggcgtcgtcatggccgtcgtcttctcggccgccgcggccttcctcggcctcaaggtcgggcaggtcttcgaagcggccatcccgatcgccatcatcgccgtgggcatgggctcggtgctgggcaagaagaacatgctggggcagaacgtcatcatccagtcgatcggcgcctcgtcgggcgtgatcgtcgccggagccatcttcaccctcccggcgctctacatcctgggcctcgacgccgctttctggcaggtgttcctctcgtcgctgttcggcggcctgctgggcatcgttctgctgatccccttccgcaaatacttcgtcaaggagatgcacggcaaatatcccttccccgaggccacggcgaccaccgaggtcctcgtttcgggcgagaagggcggctcgcaggccaaactgctggccgtcgcgggactcgtgggcggattgtacgacttcgtcgtcggtacgttcggactgtggaccgaatcggtctcgacgcgcatctgcgaatggggcgctgtcgccgccgacaagttcaaagtggtcttcgggctgaacacctcggccgccgtgctgggtctggggtatatcatcggcctgaaatacgccatgatcatcaccgccggctcgtgcctcgtctggttcgtgatcgtcccggtggtcggctcgctggccgaagcggtcgattccgccgcgatgctctcgctgctgggcgtcacgcgcgccgacatcgtcgccgacccgcagtcgatcttcaccgccgaaaacctcttcgccttcatcggcaagccgatcggcatcggcggcatcgccatggcgggcatcatcggcatcatccgccagtcgaagatcatccgccaggccgtaggcctcgcggtctcggagttcggaggcggcaaaagcgccgccgcggcccccgagcgcacgcaacgcgacatctcgataaagcgcatcctcacgatcctgatcgccacgctcatttcggtcttcgtcttcttccacttcgggctgctcgacggctgggtgcagtccgtcacggccattctgatcgtcttcatcatcgcgttcctcttcacgaccgtcgcggccaacgccatcgccatcgtgggaacgaaccccgtctcgggcatgacgctgatgacgctgatcctctcgtcgctggtgctggtgagcgtggggctgagcggcacgacgggcatgaccgccgcgctggtgatcggcggcgtggtctgcacggccctgtcgatggccggcggcttcatcaccgacctcaagatcggctactggctcggcacgacgccccgaaagcaggaggcctggaaattcctcggcacgttcgttgctgcggcaaccgtggccggcgtgatgatcatcctcaacaaatcctacggattcgtgggcgaaggggcgctggtggctccgcaggccaacgccatggcggcggtgatccagcccctgatgaccggcggccagaccccgtggatgctctatttctgcggcgctgcgctggcccttgtgctcacgtcgatcggcgtcccggccctcgccttcgcgctgggcatgttcatccccatggagctgaacgccccgctggtggtgggcggactggtggcctggttcgtctccggccgctcgaaagacgagggtctgaacaaagcccgcttcgaccgcggcacgctgatcgcctcgggattcatcgccggcggcgcactgatgggcgtggtgagcgccgtgctgaaattcgtcggcgtggactggttcctctccggctgggcctcgtcaaacgccgccgaatggacgggccttgcgatgtacctcgttttgatcggctacttcgcctggcacaccctgcgggccaaaaaggaagaataacatttaatctgcaacgacaatggacttgaaagaacgttttctgaaatacgtctcctacgacacccagtcgtcggaggagagcacgacattcccctcgaccgaaaagcagaaggtcctcctggcggccctgcgcgacgagatggaggccctgggcatgaccgaggtcacgatggatcagtacggctacgtgatgggcaccgtccccgcctcgaaagggtgcgagaacgcccccgtcatcggcttcatcgcccacgtcgacacctcgcccgacatgagcggcaaggaggtgaaaccccgcgtgatcgacgagtacgacggcagcgacatcgccctgaacggccagctgacgatgcgggttgcggacttccccgagctggccttcttcaagggccacaccctgatccacaccgacggcacgacgctgctgggcgccgacgacaaggccggcgttgcggagattatgaccgccgcggaatacctcatggcgcaccccgaggtgaaacacggcaagatccgcatcggtttcacccccgacgaagaggtgggccgcggcgtggatttcttcgacgtgaaggccttcggcgccgatttcgcctacacggtcgacggcggcatggagggcgaactggagtatgaaaacttcaacgcggcgagcgcgaaggtcgagattcagggccgcaacgtccatccgggctacgccaagaacaaaatgatcaatgccatcgacgtggcgtgcgaacttcaggggttgctgcccgcctcgcagcgtccgcagttcaccgagggttacgagggattctaccactgcgtagggctgaacggcacggtcgagaacgcttcggtcagttacatcatccgcgaccacgacgccgagaagttcgagcagaaaaaggtcttcatgtgggccgcagtcgacctgctgaaaaagaaatacggcgaccaggtcgtgaccctcacgctcaaggatcagtactacaacatgcgcaagatggtcgagccgcacccgcaggtgatcgacaaggctctgaaagcgatggagatggccggcgtgaaacccctcgtgcggcccattcgcggcggcacggacggcgcgcgcctctcgttcatgggcctgccgtgccccaacctcttcaccggaggcatgaatttccacggcaagttcgaatactgttcgctcacgacgatgcgcaaggcccagcaggtgatcctgaatctggcggttctttggtctgaatagcccgaagaacaattaaaaatcacgaagtctatggacaatttcggttttctcaaggtggcggcggccgttccgcacgtgcgggtcgccgactgcgactacaacaccgaacggatggcggcgatggccgaggaggccgcccggcggggcgtcgagatcgtggcgttccccgaactgggcgtcacggcctacacctgcggcgacctcctgttgcagcagacgctgctcgacgcggccgacgaggcgcaggaacgcctggtgcgcgccacgcgcaaactccccctcacgctgatcgcaggcgctcccctgcgccacgggtcgacgctctacaactgcgccgtggtcttcacgcaaggcaaagtgctgggcgtggttcccaaaacctatatccccgactacggggagttctacgaaaaccgctggttcgcgtcgggcgccgggatttccgacgagcatatcgccgtcgcggggcagcaggccgacttcggcgccgacctcacgttcgaagtcaacggcgcggagttcggcatcgagatctgcgaggacctctggaccgccgcaccgccctcgtcgcagctggcgctcaacggcgcgaaggtgatcttcaacctctcggcatcgcccgaatcggtcggcaaacacgcctacctgcggcagttggtggcccagcagtcgggacgcgcgattgcggcctatgtctactgctcggcgggcttcggcgaatcgaccaccgacctcgtgttcgccggcaacgccgtcatcgccgaaaacggctgcattctgcgcgaagccgcgcgcttctcgcccgacgaacagctggtcgtcgccgacgtggacatcgagcggctggagttcgaacgccgccgcaacacctcgttccgcgcgaacgaaggggccacggagaacaccgtgatcgaaatggagattcccgaggggcttcgcggcgtggcgctcgaccgcgacatcgacccgatgccgttcgtacccaaggacgaagccgaccgcagcgaacgctgcgaggagattttccggatacagtcgcacggacttgcgcagcggatggttcacacccgctccgaaaaggccgtcgtcgggatttcgggcggcctggactcgacgctcgcactgctcgtgacggcccggaccttcgatttcctgcacctcgaccgcgcgggcatcatcggcatcacgatgcccggattcgggaccaccgaccgcacctacaacaatgcgctggagctgatgcgcggactgggcgtgacgatccgcgaaatcccgatccgcgacgcctgcacgcagcattttcaggatataggcctcgaccccggctgccggggcgcggcctacgaaaacgcccaggcgcgcgaacgcacgcaaatcctgatggacgtggccaacatggagggcggactggtcatcggcacgggcgacctgtcggaactggcgctgggctgggcgacctacaacggcgaccagatgtcgatgtacggcgtcaacgcctcggttcccaagacgctggtgcgccacctcgtgaagtgggccgccgcgacggaacaggacgccgcgacgcgcgccacgctgctcgacatcatcgacacgcccgtcagccccgaactgctcccggccgacgacaacggcaaaatcgcccagaagaccgaggacctcgtggggccttacgaactccacgacttcttcctctacaacttcctccgcgcgggttacggtccggcgaaaatcctactgctggccgaacaggccttcgacgggagttacgaccgcgccgcgattcttcggtggctcacggtcttcgtccgccgtttcttcacccagcaattcaaacgttcggccatgcccgacggcccgaaagtcggctcggtgacgctctcgccccgcggcgactggcgcatgccctccgacgcctcggcagcggcatggctgcgcgaactcgacacgttataacatagacccaatgaagaaactcctgttattcacagcatccctgctcctgctcggcggcacgacctcctcggcgcaggactggaaagaggccctgaaaaaagccgccacggcggccgccgacaaagccaccgacggcaagctgacccaatatgctcttgccggaacgtggaactacacgggtccgggcgtcaagttcgaaggaggcgacatcgcttcggaggtcgggggcgcggcgctcgaaaccgccgtcgtcaaacagctcgaaaaggcctatgccaaggcgggcatccgccccggcgccggaacgttcaccttcggcaaggacgacgacgccttcaccgccacgctcggctcccacaccctctcgggaacctacgaatacgacgccccgacacacgtcgtgacgctccatttcgccaagggcaagctcaacctgggttcggttcccggccacgcctacatcagcgggcaggaactggtgctggtcttcccggtcaccagactcgtcgaggtcgtcacggcgctcggcagcaaagtctcctatttttcgacggccacgacgctgctgtcgaaatacaagaacgtctacgtcggcttcgccttttcgaaataatacgggcttcccggcgggaaaagccgaaaaaaatttgaaaaaatttcgatgacggatttactgcaaatccgtcatttttcgttacggattttcattcccgaagtccaaccttctcgcagacagtaagcaaattcggggagcggataaataaaatattttacgaaattcttaaataagttgcaaaactccgataaatgttctatttttaggggcgagaaacaaatacaaaccccctcaaaatcgaatcgcttatgaacgaacaagcccaacagtacgtcgaagacttcatggcccggctgattgcacgcaatcccggagagccggaattccatcaggccgtccgcgaggtggccgaatcgctggccccgcacatcgtgaccagcccgatcctgcaaaagatgaaggtgctggaacgcattgccgaacccgagcgcgtgattattttccgcgtgccgtggctcaacgacaaaggcgaaatcgaaatcaaccgcggctaccgcatccagatgaacagcgccatcggcccctacaagggcggtatccgcttccacccctcggtgaacctctcgatcctcaagttcctggctttcgagcagaccttcaagaacagcctcacgacgctcccgatgggcggcggcaagggcggttcggacttcaacccgaaaggcaagtcggacaatgaggtgatgaaattctgccagtcgtttatgaccgagctgcaacgtcacatcggacaggacaccgacgttccggcgggcgacatcggcgtcggcggccgcgaaatcggcttcatgttcggccagtacaagcgtctgcgcgacgaattcaccggcacgctcaccggcaagggccgcgactggggcggcagcccgctgcgccccgaggccacgggctacggaacctgctacttcgcgcaggagatgctcgccacgcgcaacgactcgttcaaagggaagaccgtctgcatctccggctcgggcaacgtcgcccagtacgcctgccagaaggccaccgaactgggcgccaaggtggtgacgctctccgattcgtcgggctacatccacgatcccgaaggcatcagccccgagaaactggaatacgtcatggagctgaagaacatcttccgcggccgtatcaaggaatacgcggaaaaatatccgtcggcaacctactaccccggcgaacgtccgtggggcgtgaagtgcgacatcgccatgccgtgcgccacgcagaacgagctgaacggcgacgaggcgcaggcgctggtcgacaacggctgcatgtgcgtcgccgaaggcgccaacatgccctcgacgcccgacgccatccggattttccagcagcacaagctgctctacgctccgggcaaggcggccaacgccggcggcgtcgccacctcgggactcgaaatgacccagaactcgatacgcctcacctggtcgcccgaggaggtcgacgcgaagctgaagtccatcatgcagaacatccacgcggtttgcgtgcgctacggaacccagtccgacggttacatcaactacgtcgtgggcgccaacatcggcggctttatgaaggtcgccaacgccatgctcgcccagggctgcgtctaacaggcggtacaactacgaaaaaccggccggaaactgtttccggccggttttcattttttcgggacgatttacagaaaaagcaccgcgaggacggacacggcgaaaccgccgcagaatccggccagcacctgccagccgttgtggcatccgaggtagaggcgcgccgacgcgagcgccccggcgcagaggatggcgaccatgaggggaacgagcatgttgcccacgcccacgacgttcatcaccacgagcagcgccacgacggcccccatgcccgtcaggtgaaggctgatcttccagtagaacgacaccacgagacacagcacctcgcagcaggccgcggcgaccatgaatttacgcaggaaaatcgccgaaggaatcttcgcgatggtgatggcgcacagcacgtagcagacggccccgacgagcagcggcaggaagcgttccctgcggtcgtcgatccggtagtccgaaatgcggcccagcgagcgcagcacgccgagcgacagcagcggaatgacgatcgcgtagagcgccaccacccacagcaaatagaacttcacattgggaggatagtgcgaaaaggcggtcatcgtcagcagcaccgccatcaggtagacgggcagcaggaacggatgcaggacccaggatatgccggtagcgatttttttatagttcatttccaattctttaatgcccgccgttcagacgggcgtcattgcgaggaggactttcagtccgacgcggcgatctgcggatcatgtcggaacctcccgactatccatcggattgccacgctcattgcattcgcccgcaatgacccgcccgcttaaaaaacgtttttcaaggcaggcagcgcagacccgaatccgatatccgaaagcctgccgcccttaaatcccgcttcttaagcgggctatatctgtttccgaagccttgccaccggtattcccagcatctcacggtatttggccacggtgcgccgggcgatgcggtagcccttcgaattgaggatgtccatcagcgtctcgtcggtcagcggacgccgcttgtcctcctcgtcgatgcactgctgcaagatgttcttgatctcgtagctcgacacctcctcgcccgaatcggtctgcatggcctccgagaagagcgatttgaggaggatgatcccgaactgcgtctgcacgtacttgctgttcaccacgcgcgagatggtcgacacgtccagccccgtgcggtcggcgatgtccttgaggatcatcggccggagtttcgacttgtcgccgtccttgaaatactcctgctggtagtccaggatggtctgcatcgtgcgcatcagcgtgtcgtgccgctgcttgatggccgagatgaaccacttcgccgagtcgatcttgttcttcacgaactgaatggcctccttgtccttctccctgacccgcccgtccgaacccaccatttcgcggatcatctccatatagcggcggttgacgcgcacctcgggaacgttgtaggagttcagcgagaggttgaaccgcccgtcctggtagtcgaggatgaaatccggaatgatatagggcgtggtgtccgtgccgccctcggcgtagaggttgccgggcttgggcgacaggtggcggatctcggcgatcgcgtcgcggaaatcgtcctcggatatttgcagccgcgccatcagtttctcgtagtgcttcttgacgaactcgtcgaaatagctggtcagaatcttcctggccagccgccgcggacgggtgttgaccggcatctgcgccatctgcaacagcaggcattcgcgcaggtcgcgcgcgccgatgcccgccggctccagttcgtgaatgattccgagcaggcgttccagctccccggccgtcgtttcaagccccatcgtgaaggcgatgtcgtcggccacggactccagatcgcggcgcaggtagccgtcctcgtcgatgctgccgatcaggtagaccgccagccgcatgtcgcgctccggaagattgcggtagcccagttgctcgacgagatattcctgtaacgaccgtccttcggtcagatagaccggacgctgcttgtcgtccttcgaaaagttgttgatgcggctcttgtacgacggcgtgtcatcctcccggaggtattcgtcgaaggagatctgctggggaggctgctcctcgtcctcggccgaacgctcctcctcttccagcacgatattgtcttcgatctcctgtttgatgcgctgttcgagctgcacggcgggcagttccagcagcttgatcatctgtatctgctgcggagagagcttctgctgaagcgaaagtacctgtttctgattaatagccatattgggtccaaattaagaattgttcagcattccgaatttggtctcttcatttatcgggtttcagggttttcgaaagtcgttcagggcgggcggattccggttttcgggaagtcgggcgcggcaggagcacactcaagtatgtggctgtcgcggacggcgaaggaaggccggaaggcgccgcactcggacggctttcgttagaagtcggcgtgctggggcgtccgcgggaacggctgcacgtcacggatgttggtcatgcccgtcacgaaaagcagcaggcggtcgaagcccaggccgaagcccgagtgcggcgccgaaccccagcggcgggtatcgagataccaccagagttccttctcgttcatgcccaattcggcgactctcgcatgaagtttgccataatcggcctctcgctccgaaccgccgatgatttcgccgattcccgggaacaatacgtccatggcgcgcaccgtcttgccgtcgtcgttctgcttcatgtagaaggccttgatgtctttggggtagttgatcaggatgaccggacgcttgaagtgctcctccacgaggtagcgctcgtgctcggattgcaggtcgcagccccagtcgcaggggaattcgaacttgcggcccgaagccttcagaatctcgatgccttcggtgtagtcgagacgcttgaaatcgtgctccagcacaaagtgcagacgctccaagagccccttgtcccacatcttgttcataaattcgaggtcttccatgcagttgtccagcgcataccggatgaggtatttgaggaaatcctcggccagttccatgttgtcctccagttcgaagaaggccgcttccggctcgatcatccagaactccgacgcatggcgcggggtgttcgagttttcggcacggaacgtggggccgaaggtgtagatgcggcccagcgagagtgcgcccagctcgccttcgagctggcccgacaccgtgaggttgcacgccttgccgaagaagtcctgcgcgtagtcgaccgccccctccccggtccggggcaggttgttcatatcgagcgtcgtcacctggaacatcgcgccggcgccttcgcagtccgaagccgtgatgatcggggtgtggaaatagtagaatccgtgtttgttgaaatattcgtggatggcgtaagccatggcgtgacggatgcggagcaccgcgccgaacgtgttggtgcgcggacgcaggtaggcgatttcgcgcagaaactccagcgaatgccccttcttctgcaggggatagctctcggggtcggccgtaccgtaaacctcgattttttcggcctgcacctcgacgccctgccccgcgcccggcgaagccaccagacggccgtcgacgcggagacaggcgcccgtggtcacgggcttgagctgctcctcggagattttggccagatcgaccaccacctgtatattacctacgcacgacccgtcgttcagggcgatgaacgccacgttcttgttaccgcgcttggtgcgcacccagccttttacgacgacgtcggtatcgacagcgtccgatttcaggatttctacgattctctgcgttttcatatctcgattttgtctgtgtttccagtcgttttttccgaattgacaaagttaacgattatttgcgatttgtcaaaaaaaaagtacctttggtgccgtaacgacacttccatgcgtcggaatgtttcaccgggccgcatgcaattccgttttgaacccattcaacttttttgtacctttgtcgtgattatacacccccgtaaacaatgaaacgaacgatattgacggctgcgctggcagcctgcgcgctctctgcgacggcccagatcatggaggagaggaatccggtcccgatgacacccggaggaggccgcgtctaccgtacggaggtcgtcccctacgacgcgcgccacgacgccgaggcccgcaaccgcgaagccggaggctactggaaggctttcgaacccgaggtgacgattgcgaccgaaggtcctcttcatgccgttctcgaacaggagatcgagattccgttcgcctggaccgacggcatggtctacctgcacgtggaaaatcccggttcggcctactcgctctggctcaacgaccgccaggtggccgaggtcagcgacccgctgacgcccgcggagttcgacctgacccccttcatccgcgaaggcgccaacgacttcaaactgctgatgcgcaacgacaatcccgcccggcagctcgacgccgcggcccccgtcgtccgcaagtccttcgaaaacagctacctctattaccagaacaaacgctcgatcgccgatttcgaaatcggactggtgcccgactcgctggggcgcgacttcggaatgctcgaccttaaaatcgtgacgcagaacgcatacaactacgaggaacccgtcaccgtcggctacgacatctactcgccgcagggcaagctgctcgaattcaacatgaccgaaatcaccatcccgggccgctcgaccgacacggtgcgcttctcgccgttcatctaccacacctacaagaacaaatgggaggccggaagcaaaacgccgcccctctacaaggtgatgcttttcacgcgccgcaacggagtctacaaggagtatatgcccctgaagatcggcttcggcaagaccgaactcgtcgacggacgcatcatgcggctgggcaaggagctaaaacccgtcaaggccggatacaacgccgccgccgaccgcaagacgacgctcgcggagctgaaagccctgaaggccaagggaaagaacaccatctgcccggactatccgcagcccgcatggttctacgagttgtgcgactctctgggcctttacgtcatcgaccgggccaacatcaacgccccggagcggagcggcgaccgcaccgtcgggggcacgccgtcgaacgaccctcggcttgtcggcgactacctcgaacgcgtgaaggcgatgtactaccgttcgcgcaatttcacctgcgtcatcgcctactccctgggcggtccttcgggcaacggttacaatatgtacaaggcctaccagtggctcaaatcggtcgaaaagtcccgtccggtgatctactccgacaccgacggcgagtggaattcggacctgtaaatacgacaacccaatgaaaaaactgctgttactgctgctcttcgccggcctgctcaacacggggagcgtcttcggatggggacgcgaaggccacgagacgatcgccaagatcgccgaacgcaatctgacgaaaaaagccaaaaagcgcatcgagaagtacctcgggggccactcgatcgtctacttcgccaagtggatggacgaataccgccatacccccgagtataagttcaccaacaactggcacaccgtgcccgtgaacgccgaactgcgttacgaggattcgatgctcgcgacgggcggcaacgccatctacggactggagcaggccatcgagaacctgaagaactaccgcagcctcaccgattcggccgtggaggtcaacctcaagtacatcatccatctggtgggcgacatgcactgcccggcgcacatcaagtacacgacgcacgacacgaaatacgacgtgctgttcgaggacaagtaccacaagccgcacaaattccccatccacagcgtctgggacaacgagatcatcaccaccacgcgcatctggtcggtcagcgagtgggccgatgagctggaccgccttccgaaggccgaaaggcaggccgtagcagccggaacgccgcgcgactggctccacgacaacgccgtcgtgtgcgaggcgcagttcgaatgggcgaagcccggccagcggctgggacaggatttcctgaacgaggccttgccgctgatcgagcgccagatccgcaatgccggataccgtcttgcccgtgtgctgaacgaactgttcggatagcacccccggccccgaagccccgatgccgcgccccgaagcgcggcatcgccgtttccggacgggaaaaacgatttgcccgaaccgaataaaaaggctatctttgcgccgtactgtgcccgaccgacgcacaggcggaacgcaatgaccatagagctgatcgtcataggaaagaccgactcgaaagagatcgccgcgctggtggaactgtatgcccggcgcgtgaatcactattgccggttcgccgtcaccgcgctgcccgacgtgcgcaacaccaaaagcatgaccgtccgacagcagcgcacggccgaaggcgaggccatcctgcgccagcttgccgacggcgactacgtgacgctgctcgacgagcgcggcgaagaataccgttcggtggagttcgcgctgtggctgcaaaagcggctgaacagcggcgtgaaacgcctggtactggtcatcggcggtccctacggcttctcggacgaagtttacgcacgcgccgacggcaggctgtcgctctcgcgcatgaccttctcccaccagatcgtgcgggccatcttcgccgaacagatctaccgggccttcaccatcctcaacaacgaaccctaccaccacgaatgatgcagcagcgccccgtcatagccatcctgaccgccaacgttctcgtaggcgtggggctgcgctccatcctcgaaaaagcggccccggccgccgacgtggaactgttcggcaactttcaggaatttgcggaggccgatccggagcggttcatccattatttcgtcacggcgcagctcttcgcggcgcacaacgccttcttccgcgcccgcagccacagaaccatcgtcctcgccaacggacagacgcccgccggggtgcactgcatcgacgtgcagaccgacgaggagcgtttcgtgcgctcgctcatgcgactgcaacacagcgttcgccgaccggaacacgccctgcccgtccagccgcaggccgcgcagccgctcacggagcgcgaggccgaagtgctgacgctcatcgccggcggactgatcaacaagcaggtcgccgaccggctgggaatcggcctgacgaccgtgatctcccaccgccgcaacatcatggagaagctcggcatccgcaccaccgccgggctggtggtctacgccctggcggcgggctacgtcgatcccgacgggatgtgacgcgcctcctcataaattaggattgcaccgaccgaaataaaaccgttactttgtactcccgataaccgcaaccgatacatgcaccgcaaatcgctcgtcatacccctgttgctgctggcctccgcggccgcggcccgcaccgcgggcggcgacggcccgacgccggacacggagacggccgacacggtgatcgtggtggacaaggtgcaggtgacggccatcaaacagggcctcgtgctgcgttcgcagcccgtcgcggcgtcgatcgtcggcggccgcgccatcgaacggggacgcatcggggcggtgaaaaacctctcgcaaacggttcccaacttccacgctccggactacggttcgcgcatgacctcgtcgatctacgtgcggggcctcggcgcgcgcatcgaccagccggtcatcgggctgaatatcgacaacgtcccggtgctcaacaaggacaacttcgacacggagctggccgacgccgaacgcatcgaggtcctgcgcgggccccagtcgacgctctacggccgcaacacgatgggcggcgtggtgaacgtctacacgctctcgccgctcacctacgagggcgtgcggctgacggccgaatacggcagcggggattcctaccgcttccgggcatcgtcctactacaagctctcgcccgacctcggaatggccgtgacgggctatttcacccacacgggcggcttcttcgacaacgactgcacgggcgagaaatgcgactgggagcgtctgggcggaggacgctggaaaacgcagtggcgcaacaaccggggagtgcgcatcgacaacaccttctcgttctcggcgctcgaccagggaggttatccctacgcctacgccggcgaggacatcgtgcgcgacggcaagaccgtcatccgcaacggccagatcagctataacgacccgtcgtcctaccgccgcacaacggtcagcgacggactcacggtgcgctacgacgccgcgaaatattccgtctcgtcgatcacctcgtaccagtactccgacgacgagatgacgctcgaccaggacttcacgcccgaaccctggttcacgctccggcaggcccggcgcgaacacgccctgaccgaggacatcgttttccgttcgcacgacggacggcgctacggctggctgctgggcgccttcggtttctaccgccacggcgtgatggaagccccggtgcacttcaaacgcacgggcatcgaggagctgatcgtcaagaacgccaacgagcatctgggcgcgatctggaacgaggaatactcgatctccgcggatgaactgccgctctactccgatttccgtatgcccgtgtacggaggcgccgtttaccacgagtcgaacctgcggctgggccgctggcggctcacggccggcatccgtttcgacgtggaacacacgtcgctggcctaccacagccggaccgacatggattatttcgtcagcaaggagggcggcgcgcccgcgccgaaacgcatctcgatcgacgaggggaaccgcatcgcccacacctactgcgaagtgctgccgaaggtctcgctgctctacgctttcgacgaagtgcgcaacctctatatttcggtagccaagggctacaaggccgggggattcaacacgcagatgttctccgacatcttgagcgaaaagctcaaatggcggatggccggttcgcagtacgacgaagcggacctgatgtcctacgagccggaatacagctggaactacgaactgggcggccacttctcgtgcatggacggcgccgtgcggggcgatttcgcggtattttacattgatgtccgcgaccaacagctcacgatcttcccggagggacagagcacgggccggatgatgaccaacgcgggccgcacgcgcagcgtcggagccgaagcggccctgcaattcgcgccgtggcggtcgctggagatcaacacggcctacggatacaccgacgcccgtttcgtgcgttacgacaacggcatcgaggatttcaaggacaaccgcatcccttacgccccgcagcacaccctctcggcccaggcggcatggaccctgcccacgggcgtcaagtggctcggcgacgtggtcctgcaagcgggagtccgctgcgcggggcgcatctggtggaacgaggagaacacactttcgcagcccttttatgcgttagcagacgcctccgtgcggttcgagcacaagcactattcgctcgacatctggggccgcaacctcgggggagcgcgttacgacgtcttctatttcaagtcgatcggcaacgagttcgtccagcgcggacgcccccgcaccttcggcatcactctgaatataaacatctaacaataccaacacatgaaaaaaatcctcttcctcctcttcgccgccgcagctttcgctgcctgcaacgacgacggcgaacccaaagtccgttacgccacaaccaatgacggcatcgaaaacggatacctgcaaggtgccaacctgcatttttacggcacctcgaccgtgaccgacgccaaaggcgaaacgtttacggacccggaagcctggttcgaattcgcaggcggtccggagagtttctccctctacatgcacaaaacgcgcttcgcggccaacatgccgggcgtggaaatgcggctccaaacggtcacctacaccccgaagggcgacaagtcgctcaactttgtcagggaggagatcattccctccgccctcaaagagaacaatgaaggcggaggatcgagctaccagcccgtcgaacgctataaaatcaccaatctcacaggcgcaatcgacggcgttgactgccgggtcagcttcacctgcgccggcgtttttcaggtaatatacgaaggacgactgattatcaaagaataaatatccacgaaccatgaaacccgaatacaaacctttcgtagatgaattgatcgaactctgcatcagggaggacatcggcgacggcgaccacacgtcgctctcgtgcatcccggccgacgaacacggacgcatgcgcctgctgtgcaagcaggagggcacgatcgccgggatcgaaatcgcgcaactcgtactgcaacgcctcgatcccgaaatgaaattcgaacagatcctgcacgacggcgaccgtgtcgcgcccggcgacgtggccttttacgtctcgggacgcctgcgctcgctgcttcaggccgagcgcatcctgctgaacatcatgcagcgcatgagcggcgtggcgacccagaccgccgtttacgtcaagcggctggagggacttcgtaccaaggtcctcgacacgcgcaagaccacgcccggcatgcgcgtgctggacaagatggccgtgaagatcggcggcggcgagaaccaccgcatgggcctcttcgacatgatcctgctgaaggacaaccacatcgacttcgccggcggcatccgccccgcgatcgaaggtgtgcgccgatacctcgcggccaaaggcaagacgatccccatcgagtgcgaggtccgcacgctggaagacatcgacgaggtgttcgcggcgggcggcgtcgaccgcatcatgttcgacaacttcacccccgaaatgacccgccgggcggtcgagaaggtcgccggacgctgcgagaccgaatcgagcggcggcatcacgctcgacacgatgcgcgactatgccgagtgcggcgtcgacttcatctcggtgggcgcgctgacgcaccagatcaagtcgctcgacatgtcgctgaaagcctgcgaatagaggatgaaacgcctgctccatacgccgctggcgctgctcgtgtggcgcatcgcactgctctacgcggcgctgatgctctgccgcgcggcgttctgggtctacaacgccgccctgctcggtccgccggagtggagcgaactggggcagctcgtggccgggtcgctgaaattcgacaccgcgtcggtcgtctatgccgacggcgtgttcatcctgctgtcgctcctgcccctgcacctgcgcgaacggcgctggtaccggggcatgctgttctggtattacgtgatcgtcaacgccgtgctgatcgcagccgcgaatctcgccgacacggtctacttccgttacacgcagaaacgtttcacggccgacgaaattttcttcgccgacaacgacaactcgttgcagctggccggaaagttcatggccgaaaactggtatctcgtgctgctgtgggcgggactcgtggcgttgctggcatggggttaccgccgccggacgcacgaggagagcgttttcagccgcggctgggcctactatgccggcggcacagccgtcttcgccctcgcggcggggctgagcgtcgccgggatgcgcggcggcatgacccgcatgacccgtccgatcaccctttccaacgccatgctctacacggcggacagcggcaaggccaatctgattttaagcaacccgttctgcatcctgcgcactatcggcaacgcgggaagcgtcaaatacaggaaatatttcaccccggaggaattgccccagcgcttcacgcccgtgcaccggcccgccgacagcgcggcggtcgatctcacgggccgcaacgtgatgattttcatcatggagagcatgtcggccgagcactccgcgttcctccatccggaactctacgccgacctcccggaaaaaggcttcacgccgttcctcgattcattgatgcgcaacgggctgacattcaaacggatgtacgccaacggctcgcgttcgatccaggccatgccctcggtgctgggaagcatcccctcgttccgcacgccgttcgtactgatgccccaatcgttgggtgagagccgccagctgcccgccatgctggcggacaaaggctatgcgacggccttcttctgcggctcggaacgcggctcgatgggcttcggggcctatgcccgttcggcaggcgtcgagcggctcgtaagccgcgaggactacgaggcgaagcacggcacgggggatttcgacggctactggggcatctgggacgaagagttcctgcaattcacgggcgaggagctgacggcgatgcccgaacctttcttcgccgcgctgttcaccctctcgtcgcaccacccgttcgtcgtacccgaaaagtacgccgcgacgctgcccgagggctacacccggattcacaagggcgtcgcctacgacgaccgggcgttccgcctcttcttccagcgtttcggcggcgaggagtggttccgccgcacgatcttcgtcttcgtggccgaccacgtgtcgtcggagaaattcgcggaggagacgcgctcctacccgggcaacatgcacatcatcggcttcatctacacccccgacggcgccctgcggggcgaggtcggcgagatcacgcagcaactggacatcatgcccaccctgctgggactcactggcaaccgggagccttatttcgcattcgggcgcgacgtgctgaacgaaccgcaacggccccgctggtcggtcagctacgacggacggttccgcgcgctgaccggcgaaggcgcaatcgtgctcgacgattcggacatgaatgtgcaggaatgcccggccaccccggccgccgacagtctggcacagaatttccgggcgctggtccagcagtattacacccatatcgagaaaaagagctatacggcaaatgattgaattcaaacccgtgcgcctcgaagaccgggcggtcatcgagcgttataccatgccctcgggcatctgcaactgcgacctcgccttcgccaacatgtactgctggcaggcggtgttccacagcgcgtgggccgagatcggcggattcctggtgatccgcttccagatcgacggcggcgagcgcatcggttacatgcagcccgtaggcgaaggcgacttcggcccgatcctccccctcctgcgcgaagacgcccacgcccacggacagcggctgcggatcatcggcctgacggacgaaggccgcgacacgatccgccggatcgttccctgccatttcgcgttcgagtcggaccgcgcgctggaggattacgtctacaacgccgacgatcttcgcaaccttgccggacgccgctatcagcccaagcgcaaccacatcaaccgcttcacggccgaatatcccgactactgctacgaagagctgacgcccgaccgcttcggggagtgcatggccctcgagcgcgaatggcgcaaggcccacgaaggccacacctcggagctgtgcgccgagcagcgggccatgcagcgggccttcgagcatttcgaagaactagggctgatcggcggttgcatctacgtcggcgaccgcctcgcggccttcacctacggctcggcggtcaacgaccacaccttcgacacccacgtagagaaggccgacacggagttcgacggcgctttcacgatcatcaacaaactcttcgcgcagcacctccccgaacgtttcacgctgatcaaccgtgaggaggacctcgggctggacggactgcggcaggccaaactctcctaccacccggcgttcctccagcacaaattcgcggcgatctgcatgcaccccgacgaagtggcctgcaaagagctttggatgaaggccttcggcgacgacgagcagttcgccgactcgttcatcatgcgctattactcccgccgccggatgctgacggccgaggccggaggccgcatggcggcgatgctccacctcctgccgttccggacggagctgggccgcacaacctatatttatggcgtagcgacggacccggcgttccggggacgcggactggcttcgcagctgatgcgcgaagcgatgcggctcatcgcggagcgcggcgacgatgcggcgctcctcatcccgacgcccggcaaggagtggctccgggaattttacggacgcttcgggttcgctggcgacgttccggcgaggttcgtttccgcagaccgcttcgacttcggcacgggcgacgcggccgccgaccgggcgatggtctggcggcgcgactcctcggttccgctccccgaacagctcaccgcctcctggcattcatagcctccggaactcacctccgcgagcgtcttttcggcctgcgccggaatccgtccgccacactgccgctcccggcgcaggcgacagcccgccccgagcggccgggaccggttccgacaacacctccggttccgcccgccactcttctccgccatgccgttttccgaactgccgtcgccgaaaaacagacgcccgacagtctcgcttcacaaccattccacaaatcaagggcaacgaaaaagaaatgaaagggaaatggcaaatctaccaaacgaaacacgactaaaaattaaaattttttatttgcaaaaaaaatcatccgattttgttttttaataaaataagtttaattttgaaatgtattcgaaacacaatcgaaacacaaacaagttatatttgaaaagtttttcagacagaagcgacacggtaaacagatggttaccatatatataacggaagatgcgaaggccggcagggccgcaaacggagacttcgggacggagtccccgaccgggtctttccgggccttcgaggtgtccaaacaaccggatttacaaaacgcggacaaataaaaaaattataatcgaagaacttaaaatgaaaaacgtattaaagtatctgttactggcactcatcgccgtctcgcaactcttcgcctgcggcggcagcgatgacgaaaagacccccgcggataatttcgacgtgcaattcacggttccggggtcggtagacgtcaccgaaggcggcgagtgcactttcgccgtaagtgggggggggaaatcgcccctgaccacagacacattcattcttgagtcggacgcaggcatctcctacgtctgccccatcgtcaacacctcttccgacagtttcaccgtacgcctggccgacgggtgtgaaacgggttactacaaagtcttcgtcaaaagagacgcgcgcaaaaaatcgttcggaagaatctacatcaacatcgtcgaagacatagatttcaaaccggatgcaggcaccacggtctacgggatcgtgtcgtcggccggcgtcggcgtggagaacgtcgtggtctccgacggcgcggaggtgaccgtcacgaacgagaagggcatctaccagctcaaatcggccaaaaagtggggatatgtcttcatctccgtcccgagcggctacgaagttccgtccgtcggggtgctcccgcagttccaccgcgcgctcaaaaacagcgccgacgtcgtcgaacgggccgacttcaagctcgaaaaggtcgacggacaggactcctacaagatcttcatgctgggcgacatgcacctcgccaaccgaacgggcgacctgggacagttcgcccagttcacctccgaccttacggactacatgacccgccacaagggcgagaagatgtatgcgctcaccctcggggacatgacctgggacctctactggtattcgaacagctactatttcccccagtacctgaacaccgtcaacagccagatcaagaatctgcagatcttccacaccatgggcaaccatgacaacgacttccagaccaggtcggactacgatgcggcggtcaaatatgtggatcagatctgcccgacctactattcgttcaacatcggcaaggtccattacgtcgtcatggacgacattgattgcagcagctacgacgggagcacttcccgcaactatgtcaagagcctctccgccgagcagctggactggctggcgaaagacctgtcgtacgtggccaagacgacccccgtcgtcgttgccatgcatgcgcaggtgttctatccgaccacatcgggattcaagatcgaccacgatcaggtcaacaccctgcggcttttcgacatcctcgacggatataccgtccgcttcgtgacggggcatacccacaaacttttcaacgtgacgcccgacgctccgatcgtggacgggcataacttccgggagtataactccggctcggtatgcgcttcgtggtggtggtccggcaacctcacgcccggaatccacatcggaaccgacggaactccgggcggctacggcatctgggatgtcacgggaaccgatttccaatgtctctacaaatcgaccggatggcccgaagagtaccagttccgcagctacgacctgaacaacgtgcatttttcgatggccgacgttccgctgatgccttccgacatctccgcttcggtcaagaacgcctatatgcaatatgtcaacgcctatccgcagaacaacgacaacgaggtgctgatcaacatctggaactggaattcggactggacgttgagcgtcgtcgacgaaaaccgcaagacgctgccctacaccgaagtctgggcctacgacccgctccatatcgcggcgctctcggtcaagcggttcaacaacgcgggactcaagtcgaccccgtcgttcatcaccgacaagttcacgcacttcttcaaggtgaaggcggacgatgcggacaccgaccttgtgatcaccgtcaaggacgaattcggaaacgagtggaccgaaaacatgcagcggccgaaagcattctccacggatgcctaccgacgcaagtgattttcgctacatacccaaccacaatcatcatttactaaccaacaaacacagatcttatgagagtattaagaccactggttctatctcttcttctggtattgggagggggaataacagccctttcggcccagaacagggaggtgtcgggaaaagtcctcgacgccaatcaacagccgctcgtgggtgtagccgttctggtcgatggtacgaccaaaggcgtcacaacctccgaaaacggcaccttcaaaatccaagttccgtcgggagaagccgttctccaggtcacctgcctgggttacctgccccagaaagtgacagttccctcaagccggaacagcatcacgatctacctgcaggaggacgccatcatgctcgatgcaaccgtcgtaatcggctacggtacgcagaaaaaagtcaacctgaccggcgccgttgcgaccgtagggagcaaggagctcgaaaaccgcgtcacccattcgctgggcagcatgttgcagggttccgtagcgggtctcaacatcaccacctcctcgggtaaacccggcagcacgccggcgatcaacatccgcggcgtcaactcgatcaactcggccgacccgctcgtgctgatcgacggcgtggtgggcgacctgaaccgcgtcaaccccaacgacgtggagtcgatctcggtcatcaaggacgcttcggcggcagccgtctacggcgcccgcgcagccttcggcgtcatcctggtcaccaccaagaacggctcggcccaggacggcaaggcgacggtgcgttacagcggccgtttcggctgggaggaggccacgacctcgaccgactacgagaaccgcggttactggtcggtctatacggtcaacaagttctggcaggccgactccggaacgaactatgtcaaatacaacgatcacgacatgcagcagctgctggcgcgcgtgaacgacaggaccgagcatcccgaccgtccgtgggtcgtcgaagagatccgcaacggccgcaaacagtgggtctactacggcaactacgactggtgggacatgctcttccagcagcgtcggcccgtgcagcagcacaacatctcgctcagcggcggcacgaaggacatcaaatacctcgtctcgggcgcctatgaccgccaggaaggtattcagcgcgcacatcccgacgtgtataacaagtacaacctgcgtgcgaaactcgattttcggatcaaccggtgggcaacgctctcgaacaacacgtcgttcttctcgtcgaattacaagtctctgggagacggcagcgtagacaacaccatcgcttacagcgcccgccacgcactggccaacttccccatgaagaaccccgacggatcgtggctttacagcacgccgtatctcgattacaagatcgccaacggacgccacatcctgctcaacgagggcacgcaccgcaacgtcgaccgctcgaacgacttctcgaacacgacacgcctggtcatcacgccgttcaagacgttgagcatcacgggtgacttcacctaccgcctctaccagaaccgcaatacgagccgcagttccgcaatgaactaccgcgaataccccgacgggccgctgctcgcctacgacacgggcgccggcatgaaccagctcgacgaagtggttcagacgcgcaactactattcggccaacgtctacgccaactacgacgaaacgttcggcgaggcgcaccacgtgtcggcaaccgccggattcaactacgaaacgtggtccagcaagaacgtctcggtggcaggcatcaacctctcctccataaacctcgacgacctgaatctggcaacgggctctcccacggagggcgcttacggcggcggccagaacgaatacgccctggcaggcttcttcgcccgtatcaactacgactacaaagggcgctacctcttcgaggtgagcggacgctacgacggatcatcgcgtttcgcaccgggcaaccgctggggcctgttcccctcggcatcggccggatggcgcatctccgaggagccgttcttcggcaacgccaaagacctggtggacaacctcaagctgcgcgcttcgttcggcagcctgggcaaccagaacgtgtcgtcctactacacctacatgcgcctgatcacgaacaaggatttcagcaactacaccttcgacggcagcataaagggcaaatactcctcgctgggcgcccccgtagcctccgacctgacctgggaaaccgcccagcagtgggacctgggtctggatctcaccatgctgaacaaccggctcaacttcaccggcgacgtctacatccgcgacacgaaggacatgctgaccgacggaatggcgctgcccggcgtatacggggccgattcgcccagcatgaactccgccgaactgcgcacgaagggttatgaactctccgtcagctggcgcgaccagttcaaactcgccggcaaaccgttcgaatacagcgtcggtttcaacctcagcgactacaagagcgtcatcaccaaatacgacaacaacccgaacaagtcattgaccaacctgacaaagggagattattacgtcggcatggagatcggcgaaatctggggcttcaagaccgacgggttcttcaagaccaccgaagaggcgcaggcctatgccaaagaggtcgacctgagttacagcacgggccgtctgaccggcggctggcaggccggcgacctgaagttcgtcgacctcgacggcaacggcgtctggggagtcggcaacgacaccgtcgacaagccgggcgaccggacgatcctgggcaactcgctcccgacgctctcctacggcatcaacgcctcgatccgctggatgggcttcgacgcttcggtcttcttccagggaaccggcaaccactactggtatccccacggagaaatgatgcctttctggggctgctattcctatccctacctctcctacctcccgacggatttcctcggcaaggtatgggcggaggacaatcccaactcctatttcccgcgcgcaagagcctattcttcatcgggaggttatctgagcaaggtcaacgaccgttacctgcaaaatatccgctacctgcgcctgaaaaacctgaccgtcggctacacgatccccgcgaccctcaccaagaaggccggcatcgaccagatccgcatctatttctcgggcgagaacctctgctactggtcgccgctcaaaaagaactccaagtacgtcgatcccgaagcggctatcaaccgttccggcgtgaacaacaacgcctactatccgtgggccaagacgttcatgttcggcatcgacatcaccttctaataatttcaaaatccgaataccatgaagcgattaatcatactggcagcaacgctgattgcaggattatcggcctgcgactccctgctggacaaagaaccgttggatcgggtgacgcagttcgactatttcaagacgagaagcgatctggaactcttctccaaccccttttacgacaacctgctggacaagacgccctacgatgagcagaacgacctgctcgttcagatgaccctctccgatgttctctacggaggcgacaagcgcaccgttccgaacaccggcggcggctggtcgtggggcaacctgcgccgcataaacaccctgctggaatatgtcgatcaatgcgaggacaagaaggccgtgaccgaatatacggccctggccaaattcttccgcgccgccttctatttcgacaaggtgaaacgcttcggcgacgtgccctggtacgaggtgcagctcggctcggccgacgaagcgctctacaaaccgcgcgattcacgcgaactgatcatgaccaatatgatcaaggatatcgacgaagccatcaacagcggcggtcttacggaggatatatcgacctaccgcgtcaacaaatgggcggcgctggcgctgaaagcgcggttctgcctcttcgagggaacctaccgcaaataccacggcatcaacctcgaaggacatgactacacctattatctggaggaagccgccaaggccgccaaaacgatcatcgacgaaggtccctacaagctctactccaccaaaaatccggacaaggactacatgatgctcttcgcacaggagaatgccagcaccgaagagtatatcctcgccatccggaacagctacgaggcccaggtctaccacaatgcgacggcctacacgctgctgccgacacagggccgcccgggctacacccgcaaattcatcaacatgtacctgatgaaggacggcaaggcattcaccgacaaatttaagacagagtggcaaacaatgcctttcaccgaagaggtgaaggaccgcgacccgcgcctggcgcagtcgatccgcaccccgggttacaagcgcatcggcgccaaacgggtgcagggtcccgatctcggcgtcacgatcaccggctaccaacccatcaaattcgttcaggacacgacggcctcgggaggacagatcgaccgcaacgaccgttcgacctgcgacatgccggttttccgctatgccgaagtgctgctcaactatgccgaagccaaggccgaactgggatcgctctcgcctgatgatctgaatatcaccgtcaacgaaatccgaagccgggtggggatgccggccctcaccatgagggatctcgacaaacaacccgactggtatctttcgtccgaggagtacggctatcccaatgtgaccggctccaacgaaatcgtaaacgccattctggaaatccgccgcgaacgaaccgtcgagctgatccaggagggtttccgccttcaggatctgtatcgctggaaagccggctattgcatcgaccaggccatttccggcatgtatttcccgggccccggcgaatacaagcttgcgggcaaagaaacggccgatctgattctctataaggcaggagagaccaaaccccaagccggcgaaggagtttcggtatacgaactcggttcggacatcattctctccgagggggacaaaggctatgtctactatcacaaaaccgtagagaatctgcgcactccgttcaaggaggaacgcgattacctctacccgattcccagcggcgagcgttcgctcaacccgaacctcacgcagaatccgggatggagcgacggactcgatttttaagtcggaaataacctaaaaaacaagattatgagatttgtaaaatatatgacagccccgatcctcatggcggccctatgttccttctggggctgcgacaaggatgaggaccacctttccgaagctgttctggcgagcgccaacaccttgaatttcgaagcggaaagagcggcggaaaagatcatcaccatctatgccgacgccgactgggtgacggaagtccccgactgggtgacggtcacgcccaactcgggaaccggcgtcatggacgtgacggtttcggtgaccgacaacatgcgcgacggcgcggaggacaatccccgcaaggccaccctcgtcttcaagggacggactcttgcaagccgcgcacaggtgctcatcacgcagaacggagacaaataccgcgatgtgaaggagtacacggcaggtgaactcgccgccctggcggacgaaacggtcatttccgtaccgtcggcgatcgtcgtggccgtgacgaccaaaggcttcgtcatcagcgacgacaaaaacacggacaatatcttcgtctcggacgccacgacggttgccgtcggcgacaagatttcgctcttgggcaccaagtcgtccgactcgcagaaactcgctacggtaatcgactgcgacgaggtgacggttctgtccggcggagcggtgaactaccccgaaccggaggacatcagcgcaaagatcgacgactacacctcctccaaacggggctacgtcaccgtcaagggcgttttcaacggcagcaccctcaccgtttcggaggacgccaagtactcggtcagcgtcgtggacgccccgtcgagtctgggcctttcctccctgaccggccatatcgtaaccgtcacgggctactacgccggtttggccgagcctgtacagcgcatcatggccaccgatgtcgaggacaacggcctgaacgagatcgtctatttcctggagaacttcgaatggctcgaaccgtggtccgtagcaagcggtgtcggccaaacggtcgagacggataacctcgatgcaaaagcgacagcgcttacctccataactgtcgatggagtgactgcattcgacgctgtcgaaaaactcggttacaagtttatctacgacaagaacgacaacaaacgcatctacctccagcagaactacctcaaattcggcaagaccggcaatcacgcaggtatcattcttcctccgatagacggggttcccgaagcaaaggacaatgtgacactctcgttcgactggtgcggaatgcgccaggggtccggcaagatcgaccccgtcaatctgatcgtcatcttcgagaacggcagcgacaaagtgcagatcgacatacccgaactgggatgggaggatggtcacaagctcgaatgggttcgcgccgaagtcagcctgaagggcattacggtcaacaaggatacgaagatcaccattacgcagacgcagtgggaagtcggaacagccaaccgctggttcctcgacaatatcaaaatatccgaaccgatcaaactctgataacaggaaccttataaaacgaaatcagccgttgacccgtgagtcaacggctgatttttttcagcggaggcgcaaaaaaaaccgaagttttcgctccgttccgccggctaccggcccgctcgccggaggaaacactcgatcgtgttctccatcaggcagcagatcgtcataggcccgacgccgcccggcacgggcgtgatcaccgaggccttgggttcgatggccgcaaaatcgacatcgccgcacagtttgcccgtctccgggtcgcggttcacccccacgtcgatcaccacggcgcccggcgacaccatctccgccgtgacgaacttcggccgaccgatggccaccaccagaatctccgccccgcgcgtcacttcggcgaggttgcgcgtacgactgtgggccatcgtcaccgtagcgttcgcgtccaagagcagtttcgacacgggaagtcccacgatattgctgcggccgatcaccacggcgcgcttgccggcgatctccacgcctgcggcccgcagcatcttgagaatgcctttcggggtgcaggggagcgtgcagggctgtttctgccacagcgccgcaacgttcaggggatggaagccgtcgacatccttctgtttgtcgatggcggcgatcaccttgtcctcgtcgatatgtttcggaaggggcagctggaccagaatgccgtccacctcgtcgtcgaggttcagggccgtgatgatgtccagcagttcggcctcggaaacggactcgggctttcggatcgtggtattgcggatgcccacctcggccgaagccttggccttgcccgtcacatagctcacgctgccggggtcctcgcccacgaggatgacaaccagatggggcacacggccgtatttcgcggggaaggtcttcacctcgtccgccatttcaagtttcagtttcgctgaaagttcttttccgctgattatttttgccatatatcgctcgtattatctttccaaatcgtcgaaagcccggtggccgatgtcggtgcggtggaacagattgtcgcagtcgatgcgggccacgtcggccagcgcattcctccgcgcttcggccaggtccctgcccttgcccaccacgaacagcacgcggcctccgttggtgagaatccgcccgccgtcggcccgggttcccatgtgataaacagccccttcgacgcggtccaggcccttgatctcgtgtcctttttcgtagtcgcccggatagcccttcgaggccagcacgatgcccagcgcggcgaaatcgtgccactccagctgcgtatcgcgtccctcggccacggcacagaagatgtcgacgatgtcgctcttcaggcgcggcagcaccacctcggtctcgggatcgccgaaacgggcgttgaactcgatgacctcgataccccgcgcagtcttcatcagtccgccgtagagcacgccctcgaagggacacccctcggcgatcatcgcgtcggccacgggctgcatgatcttctccagggcatagcgttcgtcctccgccgtcacgaacggcaggggcgaataggcgcccataccgcccgtattgggaccctcatcgccgtcgtaggcgcgcttgtggtcctgcgccagcgccatcggccacaccttgtgtcccgaaacgaagcacatgaacgaaaactcgggaccttcgaggtaatcctcgacgaccaccttgccctcgccgaacttatcgtcgagcaacatatcccgcaacgccgcttcggcctcggccatcgtccgggcgatcaccacgccttttccggcggccagtccgtcgtatttcagcactgcgggcagaggacgcccctgcacataggccagcgccccggcatagtcggtgaatgcgcggaatccggctgtcgggatggcatatttagccatcagccgtttggcgaactccttcgacgactcgatgcgcgccgcagccttcgtcggaccaaagatgcgcagccccgcggccctgaagcagtcgacgacacccgccgccagcgccacttcgggacccacgaccgtgaggccgatgccccgctccgcggcaaagtcacgcaggcgttccacctcggtttcacgaatggccacgcactcggcctgccgggcgatgcccgcattcccgggtgcgcagtaaattttttcaacctgcggcgaacgcgacagcgcgtcgacaatggcgtgttcgcggcctccgccgccgataaccagtaccttcataaacaaaattcctttttatcgcagaataaactccgcagattccggcacttttttccgcaaaaagtgccacaaaaactctccgacgatacctccgcctgcccgaaacggtctaacgctggctccgggcgactattcgcgggtttgtaaacaaaccgtcccctccgctcgcgcttttagcccgtcccttgccaacggctccggtatccggtcggatttctgtactacccaaacatggtaacgccggtgatactaatgcttgaagtgcctctcaccggtgaataccatggcgatacccttctcgtcggccttccggatcgaatcctcgtcgcggaccgaaccgccgggctgcacgatcgccgtcacgccgtattcggcggccagcgtcacacagtcgtcgaaggggaagaaaccgtccgacgccagcacgagaccctcggtgacgcctgcggcatgcgcctgcttcagggcgatctccgccgagccgatgcggttcatctgtccggcgccgacgcccagcgtccggccgtccttcaccgccacgatggcgttcgacttcacgtgtttgacgatatgccagccgaaattgagatcctccatctgctccgcagcgggcttcgccttcgtgacgcacatatcggccgtaacggccttcgtcgccacgtcgaggtcctgcaccagcaggccgccgttgacgctcacatactgtttcgggtccacgtcgcccttgtccatgctgacctcgagcaggcgcaggttcttcttcgccgagagcacttcgagcgccccctcgtcgaatttcggggccatgatgatttcgaggaagatcggcttcatcagctcggccgcttcgcgcgtcaccgtgcagttcgtcgccacgatgccgccaaagatcgacaccttgtcggcctcgtaggccttcgtccatgcctcgacgacatccttgcccgtcgcggcgccgcagggattcatgtgtttgaggcccacgcagaacggcttgtcgaactcgcgcacgatgcacagcgcggcgttggcgtcctggatattgttgtacgacaactccttgccgttgagctgtctggcgaatgccagcgaatagggcacctccttcccctcgcggtagaatttggccgactggtgggggttttcgccgtagcgcagcgactgcacgaggtcgaactcgaggaaaagcttctcgttcagacccgcctgcgcgcgcatataggcggcgatcatcgcgtcgtactcggcggtatgcgtataggctttggccgagagcttcaggcgcgtggccttttcggtattgccgccggcgcgaatctcgtccagaatcgcgtcatagtccgcggggtcgcacaccaccgtcacgtcggcccagttcttggccgccgagcgaagcatcgaaggtccgccgatgtcgatgttctcgatggcgtcctccatcttcacgccgggtttcgaaatcgtctcccggaacggataaaggttcacgcagaccatgtcgatgaactcgatatgattatccttcagggctttcaggtgctccggatcgtcgcggcgggccagcagtccgccgtgcacgttgggatgcagggtcttcacgcggccgtcgcagatctcggggaatcccgtcacgtcgctgatgttgattacctccacgccgctgtcggccaggagcttcatcgtaccgcccgtggcgatcacctcccagcccagagtccgcagccctttggcaaactccacgacaccggtcttgtcacttacactaattaatgcgcgcattattcgatcagttttttaatagtttcaatgtataacggatattccacggcatgaatcatcgcttccagttccccgatgtcatcgccctcgtagggaaaggcccgctgggcgatgatgcgtccgccgtccagctcggcgtcgacgtaatggatcgtcacgccgaagaccttgacgccgtattccagcgcctgctcgatggcatgcgccccgcggaaggccggcagcagcgaggggtggatgttgatgatccgcccgccgtaggcccccagcagcacgtcgcccacaatgcgcatatagcccgccaggcagaccagctccacgcccgcggcatccagccgcgcgacgatctcccgctcgtagtcggccttcgaggcatattgcttcggcgcgaagacgaacgccccgacctcgtgagcggcagccctttcgaccaccttcgcaccgggtttgtcgcagaccatcagcacgacttcggcatccagcacgccccgctcgcaggccgtgacgatggcttcgaagttcgtgccgctgccgctggcgaaaaccgcaaggcgccgcatccctctatcggatgacgacaccctcggtgtcggttacgcgtccgatgaccgtggcacgctcgccctgctccgtgaggatgccgatggccttctgcgcctcggcggcatcgagggcgatgaccatgccgatgcccatgttgaagatgttgaacatctcgcggtgggccaccttgccgtacttttcgaggaagcggaacacgggcagaatctcccacgacccttcgtcgatctcaagcccctgcccctcgtggaggatgcggggaatattttcgtcgaaaccgccgcccgtgatgtggctgatgccgtgcacgtcgcagttgcgaaccacctccagcacctgcttcacatagattttcgtcggcgtgagcagcacctcgccgagctgtttgttcgacagttcgggataggactcgcgcaggttcaggcagttgtccgcgacgatcttgcgcacgaggctgaagccgttggagtgcacgccgctcgacgcaacgcccaccagcacgtcgcccgccctgaccttcgaaccgtcgatcagctgcgacttctccacaacgcccaccgtgaatccggcgatgtcgtattcgccctcggcgtacatgcccggcatctcggcggtctcgccgcccaccagcgcacagccggcctgacggcagccgtcggcgacacccgcgacgatggcctcgatcttctggggttcattgcgccccacggccacgtagtcgaggaacaccagcggttcggcgccctgcgccagcacgtcgttgacgcacatggccacggcatcaatgccgatcgtgtcgtgcttgtccatctcgaaggccagcttgagtttggttcccacgccgtcggtcccgctcacgagcaccggttccttcaccttgagggccgagaggtcgaacataccgccgaaggcgccgatgttgcccatcacacccagacgcgaggtcgaggccacatgctttttgatgcgccgcaccacttcgtatccggcttcgagattcacgccggccttttcataactttgagccatagcaatatatggtttaaataatttaaattccctgtttttatccccattctccgggcccgtcattgggaggcatcgccagatgccgtggcaatccgggaaaaatgccgtaacgtcacaacaccggttcagattgccgcgtcggacctgcgtcctcctcgcaatgaccgcttcgcgtccgctaacattttacgtccttgttggcctcctcgggcgactggtagagcgccgtgggatactgccccgtgaagcaggccatgcaaagttccttgcggctgcccgccttcaacagcgactcgggcgagaggaacaccagcgaatcggcgccgatctcctcgcagacccccgccgtgttcttgcgggccgagatcagctcctcgcgtgtcgaggtgtccacgccgtagaagcagggatcggtcatcgggggactggcgatgcgcacgtgcacttcggtggctcccgcctccttgagcatcgtgacgatgcgccgcgaggtcgtgccgcgcacgatcgagtcgtcgaccagcaccacgcgcttgcccctgacaatcgaacgcacggccgaaagtttcatcctcacgcccttctcgcgcagctcctgcgagggctggataaaggtgcggccgatatacttgttcttgataagtcccatttcatacggcaatccgctcgcctcggcgtaacccatcgcggcgctgaggctcgaatcgggcacgccgaccacgatgtccgcctcggcgggagcctccttccagagcaggcgtcccgactccttgcggtaggcgtggacgttgcagccgtcgatgtcgctgtccgggcgtgcgaagtagatgtactccatcgaacacatttcgtgacgcttgtacatcgagtagtcgcggctgcggatgccctgtttatcaatcgtcacgatctcgcccggctcgacgtcgcgcacgaactccgcgcccagcacgtcgaacgcgcacgtttcgctcgacaccacccatccgtcgcccagcttgccgatcgacagcggacgcaggccgtacttgtcacggcaggcgtagatgcggttggccgtcataatcaggaaggcgaaagccccttcgagcatgttcagcgcgtcgatgatcgagaagatgcgcggccggtcgtggtagcgcgtctccttcttgatcaggtgggccaggatctcgctgtcggaggtcgactgaaacaggctgcccttgttttcgaggtggcggcgcagcaactccgaattgacgatattgccgttatgcgccagcgcgaagtcgcccgtgttgtggcggaagaggaacggctggacattctccatgccgccgcctccggccgtggtgtaacgcacatggccgatggccgtggaacctttcagcgtggcgagtttcgcctcgtcgaaaacctccgtcaccagccctccgcccttgatgcggcggaacgtgccgctctcgtccaccgagacgatgccggccccctcctgcccgcggtgctgcaaggcgtggagaccgtaataggtcagcgacgcggcgttcggcactccgtagatgccgaacaccccgcactcctcgtgcaattcacggtcgcggatcacttccatcatactacccgacgattttttgcaggcgcgccagaatctcctcgtaagcctcgcggaccttgcccaggtcgcggcggaaacggtccttgtcgagtttctcgttggtcgtggcatcccacagacggcaggtgtcgggcgacacctcgtcggccagcacgatctcgccgtccgacgtcttgccgaactcgatcttgaagtccaccaacttgatgttcatcttcaggaacagctccttgagcacctcgttgatcttggccgtcatggcgtacatctcgttcagctcctcgtacgtagcggcgcccagcgcaacggcgtgatggtcgttgatcagcgggtcgcccagctcgtccttcttgtagcaaatgtcgaaaatgacgttcgagggctgcgtgccctcctcgatgccgagacgctgggccatcgaaccggcgatgacgttgcgcacgatcacctccagcggaatgatcgtcacccggcggcagacctgatcgcggtcgttgatcgtctcgatatagtgggtcttcacgccggccttatgcagctccttgaagatcagggtcgaaatggcgttgttcagcacgcccttgttctcgatcgtagctttcttgatgttgttgaaagccgtagcggcatccttgtagtggatgatgatcttatcgggatcgtccgtgcgaaaaacctgttttgccttgccctcgtagagcatttcgagctgtttcatgttgtttgggtgttttttgattatttgattcgttgtctcatttcatattgaagtccaccacgatcggacggtggtccgaggggtgccagaaattcgaaagtttggccgggtcgcggaccggctcggtgtaggcgtcggtcaccacgtcggcatgcgtgatgcgctcgtagagcggcggcgtgcagtaaacgaagtcgatgcgcgacttgccgcccgtcgtggtcttgaactccccgggatatttcccggcgatcacgtccacataaggcgtgtgccggagaatgtagtcgtgcaccaggaaacgcgtgtcgcccgccggatatttgtagaaccagttgtcgcgcgacgaacgcgcgttgaaatcgcccatcatcatccagaactgcttttcggcgcccggaaccgaatggatcgtatggttgcagatgtattccatctccatgcggcggtatttgtcgccgccgttctcggcacggctcgcatcgcggtctttagcctcgaaggcatacccctgcggccaggtgtgaagcgttacgatgttgaccgtcttgccgttcttctcgatgcgcgcccagcccgctccgtgcgtcaccacgctgtcgggtttcgagccgacgatacgttcgacgttctcgatcgggtatttcgacgtgatcacctgcgggtaattgtcgcggtgtccgcccacataccagtatttgtggccgtaacgggcggccagttcgccccagttcccgaccagataacggtcggcgacatccatcttgtcggccgtgccggtcttgtagatcgactgcgcctcgcaccagacgcagacgtccggatcgtacgccctgacccactccacgaacttgtcgtagttgtcgccctgcccggaccacattccgttctgaatgttccagtacagcaggcgcatgttgtttttcgggttcttcgggtttttccgggcatgaacgcagaccggagcgagcatcgccgcaagaagcagcacgccgcaaaatcggaacagggaggttttcatcggttatcgtttttttaaggttattgcactttgcggaaataggccacggcattggcgaacaacgactgctgcttgttgccggcgatgttcttgaacaggttgttttcgtaacgctccgtgtggcccatctttccaagaatcaacccgttctgcgagatgatgccctcgatggcgtacgacgatccgttggggttccagggagcctctgccgtggggttccctgcggcatcggcgtactggaaggccacctgcccgttggcgaacagctcgcgggcaagctcctcgctcaccacgaacttaccctcgccgtggctgacggcaatcgaatgcagttcacccggacggaagccgcggagccacggggaagcggtcgtcgcgacgcgcgtcgagacgatctgcgaaatatgacggttgacgtcgttgcggaacagcgtcggcgactccttggtgaccatgcccagacgtccgtaaggcaaaaggcccgacttgaccaacgcctggaaaccgttgcagatgcccaggatcaggcctccgcggtcggtcaaagcgtggatttcgtcgcgaatatccttattgttcaacacattgacaatgaatttggcgcttccgtcgggttcgtcgcccgccgagaaaccgcctgcgagcacgaagatgtgcgcccggcggatatgctccttcatttcggcgatcgagcgcaaaacgtcgtcgccggcgatgttgcacaagacgctcgtccggacctcggcccccgccgcgcggaacgccttggcggtgtcgtagtcgcagttcgtgccggggaacaccggaatatagaccaccggggtctcgaccgcctcgccgggataaacgaacgttttcggggcgggtgcggaggtcatcacctccgccgagttccggcccttgtcggggtaaacggccgcaaatttctccgtattggccttgtaaagctcttcgagcggcatcttcaccccgttgaccgtcagcgcctcctcggcgacggtgaagcccagcagttcggcatgcggatattccaacgtgccctcacactcgacgaggatcgaaccgtaggcgtattcatacaatttcggctcgtcgagggtgatctccgcgccgacgccgttgccgaaagccatcttggcaaggccctctccgacgccgccgaagcccacggaccacgccgagaggattttcccggactcgatccgcccgctgacgaacgcaaagttctccttcagctgcgccgtgtcgggcatccggttctccagcggagtatggcggacgaggtaaatgcgatgtcctgcgcctttgaggtcggtggaaatgaccttcgaagcgtcgaccgtcgtgatgccgaaggccatcagcatcggcggaacgttgatgtcctggaacgtgcccgacatcgagtccttgccgccgatcgaaggcaggcccagttcgacctgcatcttcagcgcaccgagcagcgcgccgagcggcttgccccacgactcgggattccgggtcatacgctcgaaatactcctgataggagtagcgcatcctctcgtaacgcgcacccgcggccacgaccttcgccgcagcttccacgacggcataggccgcgccgtggtagggactccacgaagccacgtaggggttgtagccgaaggccatgatgctggccgtgtcggtatagccgtccgtggggagtttctgcaccgagacctgcgtctcgctgcgctgcatgcggccgccgaagggcatcagcaccgtcgagcggccgatcgtcgcgtcgaacatctccacgaggccccgctgcgagacgacattgttatccttgaggttgttcgtaaaacgctcggcgagggtctcccccgccacttcacgggcaaagggatcgcggttttccaccgcgccgatccgcgcctcggcataatgcttcgccccggcgctgtcgatgaattcgcgcttgaggtccacgaccttcctgtcgccgttgaacatccgcatgcgcgccgtgtccgtcacgtcggccacgtgcaccgcctcgatgttctcctcgcggcagtagcccatgaactcctccatgtccttcgcctcgaccaccaccgacatgcgttcctgcgattcgctgatggcgagttccgtggagttcagaccgctgtacttggtcttcacgcggtcgaggtagatgtccagcccgtctgccagttcgccgatggcgacgctgacgccgcccgcaccgaagtcgttcgatttcttgacgaggcgcgtcacctccggacggcggaacagcctctcgagcttgcgctcctcgggggcgttgcccttctgcacctcgctgccgcaggtttcgagcgacttggcgtcgtgctccttcgaagagccggtcgcaccgccgatgccgtcgcggcccgtgcggccgccgaacatgatgattttatcgcccggtgcgggacgctcgcggcggacgttcgcagccttcacggcccccaccacagcccccacttcgaggcgtttggcgacatagtcgtcgtgatagatctcgcggacatgggtcgtagccagtccgatctggttgccgtagctcgaatagcccgccgcggccttcttcgaaatgacgctctgcggcagttttccggaaagggtctccgacacaggcaggtaaatgtttcccgcgcccgttacgcgcatcgcctgatagacgtagctgcggcccgacagcgggtcgcggatggcgccgcccagacaggtcgaagccccgccgaaaggttcgatctcggtcggatggttgtgggtttcgttcttgaactgcaacagccacttctcggtccgcccgtctacatcgacgtcgatgtagaccgagcaggcgttgttctcctccgagacctccagatcgtccaacaggcctttctgccggaggtagcgcgcgccgatggtcgccatatccatcaggcagaggctcttgtgctcacgccccagttcgcggcggatacgcaggtacagcgccagcgaatcttcgatctcctccttgacgaacgactcctcgacggtgatgccctccaactcggtcgtgaaggtcgtgtggcggcagtggtcgctccagtaagtgtcgaggatgcgcagctcggtttcgtagggatcgcgcccctccgaacggaagtatttcaccacctcgcgcaggtcgtcggcgttcatcgccagacccatcgtcttgcagtaaggctccagttcggaatccgccatctcccggaacccttcgagcgccccgacgggcttcacttcggcctgctccatgtcgctgagcaccgaaaggtccttctcacgcgattcgacggcgttgatgtagtaatgccggatcttcgccagctccccgtcggtcgtcttgtcatcgaaaacgagcagcctcgacgagcggatgtcgacccgggcctcgggatcgatcagccgcacgcagtcgacggccgaagcggcgcgctggtcgaactgcccgggcagatactccacggcgatatacttgcgccccgcgaggtcgaacgtgtcggtcaccgagtcggtcaccacctcgccgaaaaccgtatagcggctcttttccagcagctcttcgctgaagccgaaaaggtcgtagacgcagagcaggcgcacctcgcccagcgacaggttcagattggtgttcagctcgcggcgcaggctctcggcctcgacccggaagcggggtaatttctcgacaaaaatgcggtaattggtcgtattattcatttatctctgtttgtatttcattcatcgttcagcggctcaatacgccgttatcacgtcctttggccgtgtacgtaagcggcctccccggaggggacttgcctgcgggacggctcgatcggttatttcacaaaacgtccggcccattcggcctcgaaccgtgcggcatccatccccacgaacgtgatgtggcccatcttgcgcttgggacggttctccgtcttgccgtagaggtggacatatacgcccgggaggttctccgcggcgattcgctccgcggcttcgagatcctgtcccagaatgtttttcatcaccgtgggagccaccggctgcggctcctgcaaaggctccccgaccagatagcggaccagttcgcggaactggttcgtggtcgcgccttcgatggtgtagtgacccgagttatgcgggcgcggggccatctcgttgaagtagatttcaccgcccttgatgaaatactcgatggccaggatgccccgatagccgcaatcgcgcatgaaacgctcgctctgggccttcatgcgcgccagcaccccggaatcgacttcggcaggtacgatgcacaaatccagaatcccgtcgcggtgaacattgcgccccacgggaaaactcacgacccgctcgccgtccgccaccatcacgatgctggcctcggaatcgaacggcacgaactcctccaggatgcagggaaccgcaagcaggggcagcgccccggcgatgtcggcctccgtcttcagcacccgctgcccgtggccgtcgtagcccagcgtgcgggttttcagcacggcgggaagccccagccgccgcacggcttcgcgcagcgacgcttcgtcgtccacggcctcgaaaccgggcgtgcgcagcccgtggtcgcgggcgttcgacttctcgcgcaggcggtcctgcgaatcataaaggggtttgtagccctgcgggatgttgtatttcccgcacagcggaatcagaatatcccccggtacgttttcgaattcataggtcaccgcgtcgctgcggcggcacagttcctcgagcgccgcggcatcgtcgtaggccgcaacgatatgatcgtcgcaaacgttgaacgccggagcgtcggccgccgggtcgaggcacacggtgcgcacgcccagttcccgcgcctgctcggcgatcatcagccccagctgaccgccacctatgataccgatggtcttcattaatccgcctttatgttgtttattcgtcattcgttgttttactttcgaccgttgtcattcgcggcgtgccgccgcgtttaccagtctgccccatcccaaccccctctctcgggaggagcttgtcgcacgcggttggaaatttcccaactatatttcagccttcagcacatccgcggtctgtttggcgcggaaggcgtcgagtttcgccgccagagcggcatcctgcaaagcgaggatcgacacggcgatcagcgcggcgttcttcgccccgttgatggccgtcgtggccacgggaacgcccgcgggcatctgcacgatcgacagcagcgagtccagcccgttcagggcgcgcgacttcacgggaacgcccaccacgggcagcggagtcatcgaggccaccatgcccggcaggtgcgccgcgccgccggccccggcgatgatcacgccgataccgcgctccctggccgtcttggcgtattcgcacagcagatcgggcgtgcggtgagcgctgaccacccgtttttcgaaatcgacaccgaacgcttcgagcatagcgacggcttcggccatcacctcgtaatcgctcacagagcccataatcacgcctactttcatatgaattcgttttttatatcacttaaaacccgtctcttgagcggacggagaaccggcgccggaacgccccgacctgcctccgcccctgaatcccgtctttcggacgggtgaaaaaagcagaccgccacgacatcgcatgtcatggcggtctggtatctatccaagcaccccacgagcaggcatctgctgccccagggacgctgcacgtcgcatctgctgctgacacgcccgcgaatagaaggcagcggcctggccctgctgtttctttcgttcgcgttggtcgatattgcagcctgaattcatgggaattaacctaacagttgtaaaaacaacgttacaaaaatagcgcttttcgacatactttcaaaattcccggacagattctatcgacaatttatcgacaatcctcccggctcatcgaatagggcgcatccccgggcttcgcgccccggtctttgtctggctccggctgcatcccgaaggcgatctttgcgccgccgagcaactcgccgtattcgaggaacgtcttcccggtgaccttgccgtcgacggtcatccgtcccacataacggttttcagcgcagttctgcggggcgtcgatctccacggtctggccgttctccagatggatcgccgctttccggaacagcggggagccgaccgcatactcgtccgatcccgggcacacgggatagaatcccagagccgagaagacataccacgccgaggtctgtccgttgtcctcgtcgccgcagtagccgtcgggcttcgacgaatagaggcggtccatcacctcgcgcgtccaccactgcgccttccacggctggccgacgtagttgtagaggtagatcatgtgctgcgccggctggttgccgtgggcgtagttgcccatgttggccacctgcatctcggtgatctcgtggatgcggaacccgtagtagctgtcgtcgtagatcggcggcacgacgaacaccgaatcgagcatttttccgaattcggttttgcctcccattagggttgcaaggccctccggatcgtggaacaccgaccaggtgtagtgccacgagttgccctcggtgaaggcgtcgccccacttgtaggggctgaacggcgactggaacgtgccgtcctcgttgcggccccgcatcaggcgggtttcgggatcgaacatgtttttatagttctgcgaagccttttccagccgtttcgcatcttcgtccttgcccagcatcttcgccgtctgcgcgatacaccagtcgtcgtaggcgtattcgagcgtccgggcggcattttcgttgatgcccacgttatagggcacgtagcccagcgtgttgtaatattcgtgtccgaggcgaccggtggagcttaccgtgggatgcaccttgtcgcgtcccgcaagcatcgcctcgtagagcgtggcgacatcctctgcgggcgtcactcctttcaggatcgcatctgcaactacggaagccgaattgttgcccaccatgcagccgcggtggcccggcgaggcccattcgggcaggaagccgctctcgcggtaggtgttggccaacccggcctgaatctcggcgttgaccgacgggtagaccaggttcagcagcgggaacagacaccggaacgtatcccagaaacccgtgtcggtatacatatagcccggcagcacctcgccgttgtaggggctgtaatgcaccggattgcctttggcgtcgatctcgtagaatttgcgagggaacagggtcgagcgatagaggcacgaatagaaggtccggtactgctcttcggtgccgcccgagacctcgatccgccccagcacctcgtcccagcgctcctgcgcacgggctttcaccgtctcgaaatcggcatcgccgacctcggtttcgaggttgcgcaaagcctgctcttcggagatgaacgacgaggccacgcgcgccgtcacctgctcgccgcggcgggtggtgaagtacaccgccgccagcgcatggccgccttcgaccgacgaaccggcgatttcccgctccccatcgaacagcttgctgctttcgatcggcttgtcgaagcggatgacgaaccagttgcggaaattgtcgggcacgccgccgctgttgcgcgtggtgtatcctacgacggtgcggctgtcgggcatgactttgacctgcgacccgcggtcgaaggcgtcgatcaccacgcccgattcgtccgactcgggaaaggtgaagcgcagcacggcggcgcgatccgtcggagccatttcggccacgacatcgtggtcggccagatagaccgagtaataatagggcttcgccgtctccgactggtgggagaaccagctctggcgcgcattttcatcaaccttgtctttgccgcgcacgggcatgatggaaaactgtccgtaatcgttgatccacggcgagggctggtgcgtctgcttcaggccccggatcgtgtgcgatccgtaggtgtaggcccagccgtcgcccatcttgcccgtctggggcgtccagaagttcatgccccacggcagggccacggccggataggtgttgcccgtcgaaagcgagtagtcggactgtgtgcccacgagcgtcgtgacgtattcagaagggcgcagcgaaatttcgtgtttcggggtttcgcaacagccccaggccaaagccgaaaaaaacaacagtatgaggttcttcatttttttattccaaattaccggattgagtaaaaagacaagctaccgggctttcgcctcgcagtaggcacagcggcaggtcccgtccgcctgacggtggaacagccggtcgacatcctccgtggcggagatgcagcggcggttcgggcactcgtattcgttcacgacataccgttcgctgaagaccggggtgcgttcgaagggcctgttctcgtcggcccagcgcagcagcgtatagatcagcgccatgcgcacgaactttccgttctcgacctggcggaagtaagccgcgcggggatcgttgtccacggcgcgcgtgatctcgttgacgcgcggcagcgggtggagaatgatcatatcctccttggcggtcttcagtttctcggggttgagcacgaagctgttcttcacgcggtcgaactcctcctcgtcgaggaaacgctccttctgcacgcgggtcatgtagaggatgtccaattcgggcatcacctcctccatggtctcgacctcgcgaaactccagatgcgagttctcggccatctcggcgagcatgtagtccggaaggcgcagctcctgcggagcgatcaggatcaccttgatattcgaatagcgcgacagcgccttgatcagcgagtggaccgtgcggccgaatttcaggtcgccgcagaaaccaatcgtcatgttgtcgaaacggcccttctcgcgcttgatcgtcaagaggtcggtaagcgtctgcgtgggatgggcgtggctgccgtcgccggcgttgatgaccgggatgcccgcatactgcgaggccaccaacggcgcaccctccttgaagtgacgcatggcgatgatgtcggcgaagcagcggatcacgcgcacggtgtcggccaccgtctcgcccttcgacaccgacgaggagttggcgtcggagaagccgatgacctgcccgcccagttcgagcatcgccgccgtgaaactcaaccgcgtgcgggtcgaaggctcgtagaagagcgtggccagtttcttgcccctgcacgcctcgctgtacttggcgcggttggcgataatgtcctcggccagagctacgatctgctcggtttcggcaaccgtgaggtctgtgggatcaatcaaatgtcgcataagttatttatagaagttcggattttaaattcttcaacggtccctcttttcggtcggtcccgattcacggccttccgccgtgtttgcaaaccggacccgcccctaaatccccgcctcggcggagactttggctgcgcgggtatccgcattgttccgctttcattgcgccgtcggtatttcccgctcgcggcacgcaacggatcggcggaaggcgccgggcgatcgcggcaaaccctgattctgattttaggggagcgatttttagcctgcccggtgatcggcacggatgggctgtacatgaggcactgcccattcgggacgagcggggaaggacgaaaatcgcccgctaaaatcggaattattgcatccagctctcgtccgacggattgttgcggaaggcgatcagccgcgccttgtcctcaggcttgatatacccctcctcggcggccacttcgaccagcgcgtcgaggttcgaaaggctgtaattcgtgacgttcgcctcccgcatgcggtcaagccccttctgcatcccgtaggtgaagatcgaagccacgcccagcacctcggcgccggcttcgcgcagggcctcaaccacctcgatgcacgaaccgcccgtcgagatgaggtcctcgatcacgacgaccttctggcccttttcgagccggccctcgatccggttgccgcggccgtggtccttcgagccgctgcgcacatagcccatcggcaggtcgaggatcgtggccgtgatggccgcatgggcgattccggcggtcgaggttcccatcagcacctcggcttcggggaatttcgtgcggacgatttcggcgaggcccgcctcgacatggccgcggacgacaggagccgtcagggtcagccggttgtcgcagtagatcgggcttttgatgccgctcgcccaggtgaaaggctgttcggggcgcaggaacaccgcgccgatcgacagcaggtctttagcaattttcttctccatcttacttgaacgcaggttcggcaaaattcttcattctttcccctccccatgggaagagtgtcaaccatgaaatccgccgaacctgcgttaacggcatctgcgatgccgatttcatattgacattcccactaaatctccctttggcaaagggagacttcggggcggaaacccatttattcttttcgtttttcagttttcatatcttcggcgacccacaacgtccatgtatcgacgttgtcggtcaggacttcaggcagcggcagcggaatgcgcacatcgggcgcgatgcccgcggagtcgatcccgcggccttccggaacccggcaggaacgggtcgtggggagcatcatccaccgggtcgggtcctgcggaaaataaagtatttcgcagttcgagaaatcgaggcacccgagcgtgttatcctgcccgtaaacggtcgtgcggcgactgctggccctgacttcgagcaccagctgttcacccgaggagccgactttcccatcaatcagcagccccgcccggcgaggccgcggcgagacggaatcgtagtgtatccggtaggttttcggtccgtccgtcaggaactccccggccggagtgcgttccatccgtgcgatcttcccgcgtccacgctccgtatctccggcaaactcccgcacgtgggcgacggccaggtccgaaacgcggtactccatggcatcctccgccccttcgtggtcgtagagcagccggagcagcggttcataggcgctgtcgctcccgccgccgttgccgcggatgtcgaggatcaggttttcacaccccgaggccagataagcccgcacggcagtccgcacccaagcggtctgttcttcattcaggtcgcacgacgggaaacggatcagatacgtttcgccgtccacccgacaatgggtgaactgcgggtcataacgctccatccgtgccgcgtaatccgaaggtcggcggattgatttgggccggtaagccctcacgccctccgttccgaggtgcgaatcgtcgaaccagccgagatactcggcaacggcgtcatacgtgtcgcgccccgaagcgatcccgctccgcagccgctctttcagcgccccgtactccgccgcgcggttcgccgtcttgtccggatagcccgcataggcgcgctccacgacgccgacggcgaagtcgaaatcggagacctcgccgcctttcaccgggacttgcgccccggcaggcaacaacagcccggcaacggccgcgacaagcggcagaacacgcagcaagacactcatttattccagcgccgaacgtaaaatcttctccacctcctcgggataaatgccgccctcgtggaccttcacgccgtcgacgtaaaacgtgggcacgtaatagtagtcgaacgcgtcggccacttcgggctgctccgactcctcgatcatctcgatcccgacggcggccagctccggatgggcggcacgcgcctcgtcgatgtaacgcagcgccttcttgcagaaggggcacgagcgcaggtagaaaagttttaccggtttcatagaattaacaatttttgtaatatcgttccatctcacgcagccgaatgccgtattcgccgcctatggcggcgtttacaaatccgatcccctgcctcaagccggggcttgtcgcatcgcgaccacaaggcaaccagaaccacggtctatccgacgaactcggcgacgcaccggcggtaagccgccacagggtcctccgccgcggtgatcgggcgtcccacgacgatcaggtcggaaccgatctcccgggcgcggacgggcgtggtgacgcgcacctggtccgccacgtcgccatctgcaaaacgcacgccgggcgtgaccgtcagaaactcctcgccgcacgccccgtgcaccatgccggcttccaacggcgagcagaccacgccgtccagccctgcggcccgggtgttctgcgcatatttcacgatcgtgtcgttgatcgaggcgtcgatcagaagttcctcccgcatgcgctcctcgctggtcgaggtgagctgcgtcacggcgatcagcaggggccgcgtgccgtcttcgcgcgtaaggccttcgcgcgcggctcgcatcatctcgatcgtcccggccgcatggacgttgcacatgtccacgtccaaccgcgacagcacggccatcgcctttttcacggtgttggggatgtcgtggagtttcagatcgaggaaaatccggtgtccccggcgcttgatctcccgcacgatggcgggtccctcggcatagaacagctccatgccgattttcagaaagggtttgcgctcctcgtccttaaagaggtcgaggaaccggaaggtgtcttccgccgacttgaagtcgcaggctatgattacatcgtgttgcataatatacaaatttagcatttatttttcacatcgggtcagcgtgcggcaaattcggagtttcgcagaacatattcgacgcatgtggctgtcggagccgacgagggaaacgccgaaggtgccgcgcgatcactcgatgcagccgattatgtcgctcaacttttcaatgcccagccgctccatttcgccgggcagcgcctcgacgatctccttcgaggcatagggattcacgaggttcgcagccccgacctgcacggccgaggctccggccatcatcatctcgatcacgtcgcgggccgtcgtgacgccgccgcaccccatcacgggaatccggcacgcccgggccacctggtagaccatccgcagcgcaacggggaagaccgcggcgcccgagaatccgcccatcgtgttggcgatgaccggacggcggcgcgcaatgtcgatacgcatgcccagcagcgtattgatcaggcagatgccgtcggcccccgcctcctcgcacgcccgggcgatcgcgacgatgtccgtcacgttgggcgaaagtttgatgaagacgggcttcgtcgtcacggccttcacggcgcgcgtcacctcggcggcggcgtccggacaggtcccgaacgacatgccgccgtgccgcacgttggggcacgagacgttgacctcgatcagccccacctgctcctgcctgtcgatgcgctcgcagcaataggcgtactcttcgaccgagaaacccgaaatattggcgatgacgggttttcggaagaaggttttcaaccgcggcagctcctcgcggatcacggcgtcgatgccggggttctgcaaccccacggcattgatcatccccgcaccgcactcggcgatgcgcggcgtgggattgccgaagcgcgcctcgcgcgtcgtacccttgaacgagaacgacccgaggatgttgatgtcgtagaactcgcggaactcgttgccgtagccgaaggttccgctggccggcacgaccggattgtccaatttgaggccgcagagttcaaccgaagtatctgtcataattgtaaattttgaattatgaattgtgaattgttcttaccagatgatttcatccttggtaaggaccggcccctccttgcagatacgtttgtagccgtatttggttttgcacgaacagcccatgcaggcgccgaatccgcaccccatgcgctcttcgaacgacagctggccgtcctgctccacggcgttgtagagcgcatggagcatcggcagcggcccgcaggcgtaaaagtaatcgaaatccagcccccgttcggcgatggccgtcgtgacgaagcccccgacgccccgcgaaccgtcgaccgtcgagacggcgacctcgcagcccagcgcgcggaactcctcctcgtagaagacctccgacgcggtgttgaagcccagcaccacctgcacgggctttccttcggcgaggagttttttcgccaggttgtagagcggcggcacgcccacgccgcccccgacgagcaggggtctccgcgcgtcgttcttcgtcgagaatccgttgcccagacccgtcagcaggtcgagcgtttcgcccggcagcatgcggctcatctgctccgttcccccgcccacgaccttgtagatcagcgcaatcgaacggttatcgtaatcgcagatcgagatagggcggcgtaagtacttgccctccagcgcaatattgacgaactgccccggcgccgagatccactgcgtatcgcccgcgagggtcatgcgccacaccgcgtcggtcagcggctcgttcgtgagaatcttatagatacctttcttatacataattttttcagcacttttgatccggcaaaagtgtccaaaaccggcccgacgatcgccttcgcctacttcatgcgacctaacgctggaaacgggcgcctattcgcgggtttgcaagcaaaccggccccgtttctcgcgcttttagtccgcattccgttgacggctccggcgtcttgtcggaattttatttcgaatcaatagtcgaaacgcgcagcgtgatctcctccagcacatccagcagcaccttcaccgtctccagcgccgtgaagaccgtcacgttgttctcgacggccgtgcggcgtatttcgtaaccgtcgaggcgcgtgttgtgctggttgatgtcgatggtgttgatcacgtagctgacatgcccctgacgcagcgcctcgatgatctcgttgctgccctcgttgagcttgcggcgcgtacgggtgcggatgccgtgcgcccgcaggaactcggcggtcccggtcgtcgcctcgatgttgaagcccaggtcgtagaaccgcttcaccagcggaagcgcctgctccttgtcgtggtcggcgatcgtcacgaagatcgttccgtagttcgagacgtgcatgcccgtggcctgcaacgccttgtagagcgcgcgcgtcagtttgtcgtcgtagccgatggcctcgcccgtcgatttcatttcaggcgagagatacgaatccatgccgcggatcttggcgaacgagaaggccggagccttgacgtaccagcgctccttctcacgaccgtagacctccgtgatgccctgctcgcggagcgacttgcccagaatcacctgcgtggcgatgtgggccatcggcacgcccgtggacttcgagaggaagggcacggtgcgcgacgagcgcgggttgacctcgatgacgtagacgtcgtcctcgccggcgacgatgaactggatgttgtacaggccgacgataccgatccgaaggcccagcttgaccgtatagtcgatgatcttgtccttggccttctggctcacgctgaaggtcggatagacgctgatcgagtcgcccgagtggatacccgtatgctcgacatgctccatgatgccggggatgaagacctccttgccgtcgcagatggcgtccacctccagctccttgcccatgatatagcggtcgaccagcaccggctggtccacgtcgatctccacggcggtttgcaggtagtggcgcaggcgctcctcgttcgagacgatctgcatggcgcggccgcccagcacgtagctcggacgcaccagcaccggatagccgatgcgcgccgcggcccggacgcccgactcgatgtcggtaacggcctcggcctcgggctgcggaattcccagctcctccatgatcctctcgaagcagccgcggtcctcggcgttcttgatcgcctgcgtgtccgtgccgatgatgggcacgcccagctcggcgagcggttcggcgaggttgatggccgtctgtccgccgagcgacaccacgatggccttcggtttttcgagatggatgacgttcatcacgtcctccacggtcagcggctcgaagtagagcttgtcgctggtggtgtagtcggtcgagacggtctcggggttgttgttgatgatgatggcctcgtagcccgccgcacggatcgaccagatggcgtgcacggtcgagtagtcgaattcgacgccctggccgatgcggatcgggccggaaccgagcacgatgatcttctctttcccgctgacgatcgactcgttttcttcctcgtaggtcgagtagaaatagggcacgtaggaggcgaattcgctggcgcaggtgtcgatcatcttgtagaccgggaagacgttgttcttctcgcgcagacggtacatttcgttctgcgaaaggccccacagctgaccgatgtacttgtcgctgaaacccatgcgcttggcagcgcggagcgtctcgacgtccatcgggtgtgcgcggacgacgttttcgaactcgacgatgttcttgaacttctccaggaagaacatgtcgatcttcgtcttgtcgtagatcagcgccaggtcgacgccgttacggatcagctggccgatggcatagagccggtcgtcggttccccccttgatgtaggcgagcaggtcgtcgttcgaccacttgtcgaatttcttgtgatagatgtggcagacgcccgtttcgagcgaacgcacggccttgagcagcgactcctccatcgtgcggccgatggacatcacctcgcccgtggccttcatctgcgtgccgagcttgttcgacgcgtcggagaacttgtcgaagggaaagcgggcgaccttcgtcacgatgtagtccagcgtcggttcgaacgaagccggcgtattggcgatccggatctcgtcgagcgtgagtcccacggcgatcttcgcgctgacgcgggcgatgggatagcccgaggccttcgacgccagggccgaggagcgcgacacgcggggattgacctcgatcaggtagtatttgaacgagagcgggtcgagtgcgaactgcacgttgcagccgccctcgatcttcagttcgcggatgatcttcagcgccgagtcgcgcagcatctggaactccttgttggtgagcgtctggctcggggcaacgacgatcgagtcgccggtgtggatgcccaccgggtcgatattctccatgcagcagatgcagatggccgtgtcgttgcggtcgcgcatcacctcgtactcgatctccttatagcccttgatgctcttctcgacgagcacctggtgcacgggcgagagcgaaagggcgttgcgcatcatctcgcgcagttcggtctcgtcgtcggcaaaaccgccgcccgtgccgcccagcgtgaaggcagggcgcagcaccaccggatagccgatctcctcggccaccgccacggcctcctcgatcgacatggcgatgtgcgaaggaagcaccggctcgcccagcgactcgcacagctccttgaacagctcgcggtcctcggcgcgctcgatcgactcgaacgacgtgcccagaatttcgacctggcactctttcagaatgcccttcttggccagctgcacggcgagattcagacccgtctgtccgcccagccccgggacgatggcgtcgggacgctcgaagcggatgatcttggcgacgtattccagcgtcagcggctccatgtagactttgtccgcaatgtgcgtgtcggtcataatggtagcggggttcgagttggcgaggatcacctcgtaaccctcctccttgagcgcgaggcacgcctgcgtacccgcatagtcgaactcggcggcctgtccgatgacgatgggccccgaaccgatgaccagaaccttcttgatatcttttctcctaggcatttttgtgctcctccattatttttgtgaacttcttgaacaaataagcgctgtcctgcggacccgaagcgctctcggggtggtactgcatcgagaaaacccggtcggcggcgcactccacgccctcggccgtgccatcgagcaggttgacgtgcgtcagcgtaagccccgtgccggcgagcgaatcgacatccacggcgtagctgtggttctggctcgtgatttcgagtttccccgtcacgagattcttcaccgggtggttggcgccgcggtggccgaacttcatcttgaaggtccgggcgccgtaggccagcgaaatcagctggtggcccatgcagattccgaagatgggcagcctgccgcggagctgcttcaccagttcgatcaccggcgtcacgtcctcgggattgccgggtccgttcgaaagcacaagcccgtcgggatggaaggccatgatctcctccacggtggagttgtagggcatgacggtcacgttgcaccccacacggttcagcagacggatgatgttgtacttgatgccgcagtcgacggccacgacgtcgtacttgtggttggggacacgcgacatccagcgcttcttgcagctcacacgcgaaaccatgtcgcgcggcatgacgtattcgccgagtttgcgcagggcctcgtcgcgcggcgtcgccacgtcggtgatgagcaccttctgggacccctcgtcgcggatgatgcgcgtcagggcgcgggtgtccacgccccagatggccggaatgtcgtgctcctcgaagacctcgttcagcgtcttcgtatagcggaagttcgacggcgagtcgttgtactcacgcacgatcatgccgccgatggtcggcgttttggtctcgtaatcctcgtcggccataccgtagttgccgatcagcgggtaggtcatcacgaccatctgatccgtatacgacggatcggacatgatctcctgataccccaccatcgaggtattgaagacgatctcgttgatggcctcgcggtcggcgccgaaaccgtatccgtagaactcgcgaccgttctccaagacaatttttttcgtaaaagctttcatccttatctgtttgattcgtagttatcgtcataaacctctttgccgcccaccaccgtcagcacggcgcggccctgcaccttccatccggcgaagggcgtggcccgccccttcgaaaggaacgtcccggggtccacggcatactccgccccgaggtccagcaccgtaaaatcggcggcatcgccctcctccacgcctccttcgagcgcgaaaatccggcggggattcgccgacatcagggcgacgagcttttcgagcgtgatcacccccttcagcaccaggtatttataaagcagcggaaaagcggtctccagccccacgatgcccatggcgctcccggccagtccgcgcgccttctcggcgacggtgtggggggcatggtccgtggcgatgacctcgatcgtgccgtcctgaatgcccgcgacgagcgcttcgcggtcggcgcgcctccgcagcggcgggttcatcttgaagcggccctcctcctgcaaatcctcgtcgcacagcagcaggtagtgcggcgccgtctcgcagctcacgcgcagccccttcgcccgggcgcggcgcaccagttcgacgctctccttcgtggagacgtggcagacgtgataccggcagccggtcttctccgccagcgcgatgtcgcgcccgacctgccgccactcgctctcggagcagatgcccttgtgtccgtgctcgcggcagtaaaccccgtcgtggatatagcccccgcgcagcagttcatcgacttcgcaatgagccacgatcggtttaccgacagccgcggcccggcgcatcgcctcctccatcagctccgccgactgcacgccgcggccgtcgtccgagaagccgacgacctgcggggccaaggccgcgaaatcgaccagttcgccgcatccgcgctggcccatcgtgatcgtaccgtagggtttcacgcgcaccacggcgtcgcggcggatgatctccagctgctcgccgagcgtcgccggcgtatcgggcgcagggttcaggttgggcatcgaacagaccgtggtataccccccgcgggccgcggcggccgtacccgtcgcaatggtctccttctgcgggaagcccggctcgcgcaggtgcacatgcacgtcgaccagccccggcacgaggtgccgccccccgaggtccaccacccggtcgcccgggcgcggttccccggcggccgcgatgcggcccccttcgacggcgatcagccccggttcgaaacgaccgttgcggaaaatcttcgcgttggtgtaaaatgtcttcattcgtcgctggacacaaaaaaatagggcaaccaaaacagttaccctaataaaacaataatgcccgaatccgtcggagactggaaacccgaccagtaatcctgctgccagaacgcttgcgccgatgctatgttgggtttacaattcataggattcaggtgtcgctataattgtgcacaaagatagggcattttcgccgcctctgcaacactttttccggaaaaatttttcaacatgccgtatacgccccgccgcacgcactccgcatgcggcggggcggaaggcgcatgtccgcggatttccggcgcggcaggccccggctcccggaaccgcccgccccggagagcgggctatcggacgatgatcagatcgacgcccgcctcctcgatgatcgagatcatctgttcgggaatccgctcgtcggtgacgatcacgtcgatgtcctccagcgcgcagatgcggccgaaaccgcgctgtccgaatttcgacgagtcggccagcacgatgacctgcgaggcggcgtgcatcatccgccgcgtgagtttcgcctcgtcgatagtcgaagtcgtgatgccgtgctcggggtcgatgccgtccaccccgaagaagaccttcgagcagatgcagtcgtccagttcgcgcgcggcctcttcgcccagcaccgacagcgacttcttgtgcaccgagccgcccagctgcacgacgttgacgttctccgactcgttcagcagcacgcccagccgcaggaacggcgtgacgatgttcaggtgatgccacatgcgcatcttgatctcctcggcgaaggcgtagacggtcgagccggaggccacgatgatcgagtcggtctcgccgagcatctccgccgcccgctgggcgatgcggcgcttggcgtcgcggttgatgttgtccttcacatgcacgtcgaggtccgcaacgtggggattggccggacgcgcgctgccgtgcaccttatataacaggcctttgctttcgagaatcttgatgtccttgcggatggtcaccttcgtaacgcccagttcgttggcaacgtcggtaatccggacgaaaccgtgcttgttcagactgtcgagaatgtatttgtgccgttcggcaatgctcagcatatcggtcggatatttaaagtgttacaaaagcaaagatacaaaaaaagtcggacgggcgcacacccggattacctaacggttcggcaaaaccttccgactgataaaagtatcgttacgccaccaaagataaaaaaagattccgtatttcgcaaaaaaaggtccgcaacccgtgacgggccggacccttccggaccgaagtccgtatcatcatctaaaacagaaccttcgattcccttattccgcctcgggttcgtagccgtcggccttggcgccccacatcaggaggaagaccagcatgcccacgacggccatgcccaggatgccgacataggcccaattccagccgtagtgctgggccacgaagcccagtcccacgcccgaaacgagcgtcgaagcgtagccgaacagccccgtgaggccgttggccgtggcggcggccttcttcgtggcctggttcgcggcggcaatgccgatcagcgcctgcgggccgtagatgcagaaccctgcggcgcagagcgtcgtgaacagcagccagatcggagcgtcggcaggcagctgccagaacaggaagacgaacagcgcggcgcccgccatgcagaagacgcaggtgcggtgcgcacggcccttgagccacttgtccgtcgcccagccggcgaagagcatgccgaggatgccggcaatctcgaacatcgccacgagccatccggcgtgcgacatcgagacgcccttcgactggctcaacagcgaaggcccccagtcgagcaccgagaagcggacgatgtagacgaaaaagttggcgaagcccagaatccagatcagcggattcttgaagacgtatttcattaggaacgccttgtgctcggcgcccttcttttcggtcttcacctgcctggtctcggttccttccagttcgggaagccccaccgaggtcggggtgtcgcgcaggaaaaccaccagcccgatggctccggcgaaagcgatcgccgacggaatccagaaacaccatttccacgccccgacatgcgccgcggaggtcatcacgcgctccatgcccgcagcatcgtcgggcgaaacgcccaggttggcggcgatggaagccacggcgtcgggatcgcccgccatgttcgtgcccagcgtacccatgatgtaaccgcagaggatcaccacgaggcccgcgccgatcgagtgcgaggtattccacaccgacattttcgtcgccagctccgtaggcggaatccagtgggtcagcagacgcgcgcagggcgggaatcccgtaccctgcaacagcccgttgacgacccacatgacgcccatgaagaggatcatcgtgttgccgaactggtcgcccgaatgctcgcccgtgatccagtaggagacgtcctcgccgaatccgaacgcgaagttggccagcgcacacagcgccagaccgacggccatgtaccagcgggcgttcatgcggtcggccagaatgccgttggcgaaacgcgaaaagccgtagatcaggccgttcagggtgaggaagatgccgaggctcgtcttcgaaatgccgagatcggcttccaggccgggcatggccagcgaaaaattcttgcgcacgaagtagaagagcgcgtaaccgaccatcgtcgcgatgatcgtacgcatctgccaatacttgaagcgcttggtttgttcagatgtcatttcgaaatgaaagttagtagtttcagaagccaaatatacaactttcggagcgatattctaaattattttcgtgatttttccgttttatcgcccggaagccgcacacggctctatgcgcccgggaccggagccgcggcggagcgagccggttcgccagaacccggcgcagggcttccgacctcccagacgccgcccttgccgaacagccggtcgagccactcctccatccagccgcagcggaaggcggtgtcgatgaccgtatagcggctgcgcatgtagggaatcttcccgaacgcctcgcggaaacgggtgcgcgaaacgccgatctgttcgggctcataaggcgccccgacgagttccaggcggcggcgcacctcgtcgaaaggaatgatctgccggcggatgcgttcgcgcagttcgggccacgcctttttgagccgcgtgagctggtcgcgcagcccctccctgtcgacatatttgtcgcgggtctccttcaggccgcgggccacgaattcgggatcgtcgttaaaaatggcccggatgtcccgctcggtctcgtcccacgatttccacgcagcgacgcacctctcgatgtccagctgctccacgggggcgtcgagcagcatttcgagaaaggccgtcgaggccagcgtgccgataccgaccttgaagccgtgcgacaccgaagcgccgttgtatttcaggtgctccatgtcccacagatggctgaactggtgttcggcgcccgaagccgggcggctcgactgcgtggcctgcatggcgaaaccgctcaacagcagcccttcggccagctgttcgaccttctccacattgcccgcatgcacgcctgcgggatcggacagagcctctttcagcccgtcctgcaccaatccgaaggcgaaatcgtccatcggctccgaccccacggcgtcggaaagcatccagtcggccccggcagggatcttggcgatcaggtcggcgtagcccgaagccgacattctggcgggcgcagccgccgaaatcgacggatcgagaaccatgcccagcggcgcaggacagtcgaaggtctgcttgttgccgtccttggtgatcgaggctccgtaggccgtgtaaccatccatcgaagccgccgtgccgaccaccatgtaacggcggccgttgtggtgggagcagagtttggtcaggtcgttgatcacgcccgaaccgacggccacgggaacggcatcggtcgcagccagcacaccgtccagctcctcgacgaacgaccattcggcgtagagtttcggatcggcgaacacgtgcggttcgtcctgcccgatccccgcatcggcgaggatgcggtgcacctcgccgccggcgacgcgccacgtattggtgtcggcgaccacgacggcgcggcagccgggaaacaactcgttgaacatctccgccgtccgcggaagggttccgacgccgatcaccagcgctttggtgtcggtcgtgcgctgaagggcgctctctaccttattcatagaatatctgcttgattttaccgtttccaatttttcacaaacgaaacccgcaggaaagctcccgggtttcccaaaacaaaggcaaatatagatattattttcctttcgacagccaaaagcgacgaaaaaattttcctttcacaatgcattttatttcttttcggattaataaaacgaaaaattggataaaagaaaataaaaacatacctttggatttcgaaccgatacaactttcaccatgaaacgacttaccctgctgctgggcgcgctcctgctgacggccgccgccctcgcccaaaccgccgtgccgcctacggtacgcatcgcacacggaccctatgtactgaatgtcaccgaagacggcttcacggtcgtctgggacgcaaaggccgacgccatcggctgggtcgaactcgccccgatggacggatcgcacttctactcggccgaacggcccaggtattacgactcgcatctcggactttgccgcgtcggacgcatgcaccgggtgcggatcgaagggctccaacccggcacgacctaccgctaccgcatcatgcagcggggaatcgtcctgaacgagggcaaccggcgcgtcatcctcgacgacggggacggcagcgaagtgtaccggcgcaagccctacaccatcagaaccctcgaccctgcacaggaaaaggtcgatttctggatggtcaacgacatccacgcccgcgactccgttttccagctgctgatcaaggaggcccccgaagcccagccggacttcgtctgcctgaacggcgacctggccagccagaccgagaccgagcagacgctctgggacgcctgcctcgggtcggcatcgaagatactcacgcccgcgggcatccccctcgccgtgacgcgcggcaaccacgagaaccgcggcgcctatgcacagcactggctcgactatttccccacaccgaccggcgaaacctactacacgtttcgccgcggcccggccttcttcatcgtgctcgacggctgtgaagacaagcccgacaacgatccccgctattacggcatgggcgactggaacgaataccgccggcagcaggcggaatggctgaaaggcgtcgtcaacagcgacgaattccgggcggcccccgtgcgcatcgtgctgatgcacatgatcccgggcaaggaggacagctggtacggcgagcagcagatccgcaggctgttcatacccgaactcgccggcaaaggcatcgacctgatgctctgcggccactaccaccgctaccactggatcgacgacggcagccgcggggtcgacttcccgatcctcgtcaactcgaacaacgactgcctccgcgtgtcggccgacgcgaagggcatcgacctgaaggtggtcaacaccgcgggcgccgtgatcaaacaacaccgcatcgacaaaaagaacaaataacgacatggaaaacaaaccctttcacaagtaccgctccgtctgggagcacgccgaactgatggaacgcctgcgccgcatccgccacgtggcgctcgacatggacggcacgatctacatggggatgtcgctgttcccctacacgcaggccttcctgcacggactcaaggaacaggggatcggctactcgttcctgacgaacaacccgtcgaaaagcatcgcggactacctccataaactcgacacgctgggcatcagggcttcgcgcgacgagatgtacaccacggcgctggccacgatcgactacatcaagacccatcaccctgcggccaagcggctgttcctgctcggcacgccgtcgatgatctcggaattcgaggctgcgggcttcgagtcgtgcgccgactcggccgacgacgtgcccgacgtgatcgtggcggcgttcgacatgacgctccgctacgaacggctctgccgcgcggcctggtggatcaaacaaggagtgccttatatcgccaccaaccccgaccgggtgtgccccaccgatcagccgaccgtattggtcgactgcggctcgatctgcgcctgcctcgaacacgccacgggacgccgccccgacatcacgttgggcaagcccgacccgaacatgctttcgggcatcctctcgcgccacgggttgcagccctacgagatcgccatggtcggcgaccgcatctacaccgacgtccagatggcccacaacgccggggcgatgggcgtgctggtgctctcgggcgaaacgacgctcgacgtggccgacaaggccgacccgcagccccatatcacggccgacagcatcgaagtgctgggcgaactaatccgcgaagcgcacgaataacaacagccggaactccacgaccggacgtcccgcctccgatccgccgcccggagaggggcaaacagaaacgcctgataagctacgacaatagcgctatcggaaaataccgaataatcatcggtgtgggtttataaagatgtaacgacttgatttatcgagtcgttacatctttgtacaggagaataggtaacgaaaagacaacggcttattttcagcgacttgcgctcaaataccgcatttcaaataacctctcgcaagatatgaaaaattctcaaaataggcaaattgtcgaaaacgataaaggtataacaaatttcttttttgtattctataaaattaacccgttggttgaattaaaataaagcatctttaacaagaccaattttacgatggttacagaagttgatgtattgcagcacggtcatagcagcgatttttgcggcagtacgtgtaaacagtccgcctgtctgctttgcataattgcgtaccatcatgaattggtcgttaagttgagagaaaacggtttcgattcgcttcctgaaacgcctgtaagcccacgaaggatttctc

SEQ ID NO: 42 - DNA, 180885 bp, Alistipes shahii
  source 1..180885: mol_type = genomic DNA
ttcttcggctatgtatttgctctcggaacatgaacacaagcatagaaaaaaggcgcaaacataaataaatcgtttcataaacagcccaaataattattatccaatatacgaaaaaataccgatttaacttatatctgacaaaattaacatggcataatattgaaggttccggaaaagatataaattcgcgagacctatgctttacgttaggccctttcttcttgcttttgaacttaaatcataaagaggtgaatccatccgttttgttttcgacgcactgtttgatttgccaattccaaaaacttttcgtatcttgcaaatagttatttgaaatgcggtatttgagcgcaatcaactgaaaataaaccgttgccttctcgttacctattatcctatacaaaaatgtaacgactcattaattaagtcgttacatcattataaacccacacccacttcgggtccggtctttttgggctcgaatcgtcaggtgtgtgcgcacacacttgctattttcgaaaattttgcatagctttgccgatgtaacgccgaagaacagcgcaaaccatgtccgacaacgaacatatcacggtccgcatcgtcgacatcgcccgcatggcgggggtgtcggtggcgacggtcgaccgcgtgatccacaaccgcggcaaggtctcggaggagaacctcgcgcgcatcaatgaggtgctgcggcgggtcgactaccgtcccaacctgatcgcccgctcgctggcgtcgggccgcaggtacacgctctgcgcggtcatgccccgtttcgccccgggagagtactgggccgatttcgaggccggaatcgcccgcgccgaggccgaggccgtgcgttacaacgtcacggtccgccgtttctgcttcgaccagtacgaccgttcgtcgttcgaaagcctgctggagacgctgcgccgcgaggagttcgacggcgcggtgatcgccacgctcttcgcggagatggtcgagccgttcacccgcgaactcgacgcccggggggtgccctatgtcttcgtcgattcggacattcccgcctgcaaccggctggcctatttcggcacgtcgtcgttcgacgccggggcggtcgccgcacggctgctgttcgaccgcctcgatccgggagcggacatcgtcgtgggccggatcgttcaccggggcgacgccggttcgaaccagtggcgcaaccgcgaggcgggattccgcagttacctcgaagcgcatgccttccggggccggctgcactacgccgcgctgcggctggacgacgaagcctgcaacggccgcgtgctggatgagatgttccgcgaaaatccgtcgattgccggggccgtgaccttcaattcgacgtgttacatccttgcgggctatctggcggcgcggcggcgcgatggcgtgcggctggtgggctacgacgtgatccgccgcaacggggagatgctctccgcgggcgtggtgacggcgctcgtcgcccagcgtcccgaggcgcagggctaccgcgcggtgatggccctgtgcgaatggctcgtcgagggccgcgctccgtcgaaggtcaacaacatgcccatcgacatcctgctgaaagagaatataccgtattataaaaacaacatcatctgaaaaacatgaaaaatctctttgacatccggggccgtgtcgtcgttgtgacgggtggggccgggattctgggccgctcgatctgcgcttacctcgccgggcagggcgcacgcgtcgctgtgctcgaccgcgatgaaaaggcgggcgaagcgcttgtcggcgaaatccgcgctgcgggcggcgatgcgctcttcttcgcgaccgacgtgctgaaccgcgaggtgctcgtgtcgaaccgcgaggcgattctcggggcctgggggcagatcgacatcctgctgaacgccgcgggcggcaacatgggcggtgcgacgatcgctcccgacaagtcgttcctcgacctggagatcgaagctttccgcaaggtcgtggacctcaatctgttcggcacggtgctgcccacgacggtcttcggcgaggccatgacggcccgcaggaagggcgtgatcgtcaacttctgctccgaatcggcgttgcgtccgctgacccgcgtggtgggctacggagccgccaaggccgccatcgccaactacacgaagtacatggccgccgaactggccatgaagttcagccccgagatgcgcgtcaacgccatcgtcccgggctttctgctgacgaaccagaaccgcgcgctgctgaccaacgaggacggttcgtacaccgaccgtgcgcggacgatcatcgcccacacgcccgccggacgcttcgccgagccggaggagctgctgggtacgatccactacctcgtcagcgacgcttcgtcgttcgtgacgggcgcgctggccgtcgtcgacggcgggttcgacgctttctcgatttgatccgccgcgggagccgtctcttcggcggggtctgacgggcacggcatcgggccgggattgttcgcggccagcggcaacgtgcaggaggtgcaaccgccgcattctcgcttgcagcggagaaaggacaaccgcggtcttcgcccgcggggtactttgtactttttggccgcaaaaagtaccaaaaactccccggcagatgccttcgcctacttcgtcccgtctaacgttcgaaacgggcgcctattcgcgggtttgcaagcaaaccggccccgtttcttgccacttttagccgggacttcgtttcacggctccggcatcgggccgggatcgttcgcggcaattccgtcttttcggccgggtaaagaagcgaacacgcgaacatgcgaacatgcgaacaggggcgaacatctcttgttcgcgtgttcgcggagaatcccggcatcaccccgggaagcggttttaaaccgccgcattctcgcttgcagcggagaaagaacaaccgacagcccgcgtgcccggagcgggaggctgcatagtcttgttcttgctgcgcccgctcaacgcgggccggaggttgttcccgcgaaagcgacatgcggatggttttggtacttttaacttcgctacgctcgttttcctccttctggcacggcatagcccgcaagcggtctctgctcgtgctgcgtgcgtcggttgccatcaaaagtacagagaaagccgcgacgatgtcgcgggtgttttgtaccttttttccgcaaaaagtaccgatcgcagtctgcgactggtgttgtttgccgctttttggtcggctgttaaccgcggtcttcgcccgcggggtactttgtactttttggccgcaaaaagtaccaaaaactccccggcagatgcctgcgcctacttcgtcccgtctaacgctggctccgggcgactattcgcgggggcgcacgtgccccgtccccttcgctcgcgcttttagccgggccttcgtttcacggctccggcatcgggccgggatcgttcgcggcaattccgtcttttcggccgggaaaagaagcgaacacgcgaacatgcgaacaggggcgaacatctcttgttcgcttgttcgcggagaatcccggcatcgcccctggaagcggttttaaaccgccgcattctcgcttgcagcggagaaagcaccgtatgtgaaaaatttgaaaacctaaaaacaatacatccatgtatctttgcaaacaatcctggcgctggtacggtccgaacgaccccgtaagccttcaggacatccgtcaggccggggccaccgacatcgtgaccgccctccatcacattcccaacggcgaggtgtggaccgtcggggagatcgaaaaacgccgaaagacggtcgccgacgcgggccttcgctggtcggtcgtggagagcgtccccgtccacgagcatatcaagacccgcacgggcgatttcgagcgctatatcgagaattacaaacagtcggtccgcaatctggccgaatgcggcgttaaagtaattacctacaactttatgcccgtgctggactggacgcgcacgaacctcgcctacgagttgcccgacgggtcgcgcgccctgcgcttcgagcgtgcggcgttcgtggccttcgatctcttcatcctgaagcgtcccggcgcggagaaggactattccgaggccgagcgcgccgctgccgaggcccgcttcgggcggatggacgccgcggaaaaagagctgatcacccgcaacatgatcgcgggcctgcccggctcggaggagagtttcacgctggagcagttccagcgggagctggaccgttacaaggatgtcacggccgagacgctgcgcgcgaacctcgtggcgttcctgcgcgaggtggctcccgtggccgacgaggcgggtgcggtgctggcgatccatcccgacgatcctccgttcccgatcctcggtctgccccgcattctctccaccgaatccgactttcagaaattggtcgaggcggtccccaacccttcgaacgggctgtgcctctgcacgggttcgttcggagtgtcggccgcgaacgacctgccgggaatgatgctgcggcagggcgaccgggtgaatttcgtccacctgcgctcgacgcagcgcgatgccgagggcaacttctacgaggccaaccatttggagggcgacgtgccgatgtacgacgtgatgaaagccctgctggagattcagcagcgccgacgcatctcgatcccgatgcgtccggaccacggccaccagatgatcgacgacctgaagaagaagaccaatccgggatattcgtgtctgggccgcctgcgcgggctggccgaactgcggggactggagctgggcatcgcccggtcgctgtttgccgataaatagggcagtcttgcacatgacgaatcggtgcgcctcgtgaggggcgcaccgattgtgtcagaacgggttccggagctattttttggccggggccgccggggtctgctgtccggcagcggttttcggggccgccggggtctgcgccgtggccgccggggtcgccggaacggtctcgatcacgtccacctcggtcaccacccagctgaaaaggtcgttcgcacactggctctccagccggcggatctgcgacatgtcgctcgtgtcggccagaatggcgttgaagaactggtccatcgtggcgtacgtcgcattgaccttcgccgcgaagcagttgtaaaaggctttctgctgctcgtggtcaagccctgcgggcagcacgccctgcgctacgaggtagttgtaggggtagatgtgccgcatgttgcgggcgtcggcgttcagttcgtcgacgatcgtcgagacgaccaccatgtccaccgtgtcgtcgacgccctgcatctggacgaactccatgtagacgggataactgttttcgagctgcccggccacttcgtcggagaagagcacgaactcggcgtcgttcaggtcgtcgaggtacaccatctggcggtagctgcgcagcgcttcgcgcatcgccttgcgctgttcgtggttccattgccgctgctgcgagcagccgaaaaatcctgccgcgaagattgccagcagaggtacacagaggagaatttttttcattttttaccctgattttggttttacttcatttcggaacgcaatagatgtgccaaaaaaatcatatctttgaggaaaagaacccgttatggatgttttgagtttccgcgactactgcctgtcgctgcccctcacggaggaatcgacgccgttcgacgagacgacgctggtctacaagatcggcgggaagatgtacgcctgcgcggatatgaacgatttcgggcaggtggccgtgaagtgcgaccccgacgaggcggtccggctgcgcgagcggtacgaggagatcggcccggcctaccatttcaacaagacgcactggaacggcatccgcactgcgggcgacctgcccgacgccttcatccgcgagcagatacgcaactcctacctgctggtcgtgcggcgcagcgtcacgccccggagcctgcgcgaggagattctgcgtcatgtcgaagagcacgggctgccggaatgaaccttcaacctccgaaaacgatacgatgacgatgagaatgcgatttctttttgcggcgctgacccttgcgctggcagcgggttcgtgcagccgcgaaccgcggaccgaacttttcaacggccgggacctcaccggatgggtgtgcgtcaccgacccggagggcgtcggcgacgcccgggatgccttctccgtgcagaacgggaatatccgcatagcgggcagtccgttcgggtacatgcgcacggaggagacctacgacgattaccggcttcacgtcgagtggcgttggatcggcgaggcgacgaacagcggcattttccagcgcgtgcaggccggcgaccggctttggcccgaggctgtcgagtgtcagttgcaggcggggcgcgcgggcgacctgctggggctgggcggcgcgaagatcgccggggcggagagcaacggaagggtcttcatcaagccgcgcagcggcggggagtgcgagcggcccgcaggcgaatggaactgtgccgagatcgtctgcgtgggcgatcatatcgcggtctgtgtcaacggcgttttgcagaacgagtgcaccggatcggtccgcagcgggtatatcgcgcttcagagcgagggcggtcccgtggagttccgcaacatctggctgacccgcttgagacgcgggatttaggttgcggctggcggcttcggcttgctctcgtcacgaacacgcgaacatgcgaacaaggggtgttcgcccttgttcgcatgttcgtatgttcgcgtgttcgtgcagaatcccggcatcgcccctggaagcggttttaaaccgccgcattatcgcttgcagcggaacgaggacaaccgcggtcttcgcccgcaagacttctttgtaccttttttccgcaaaaagtactgatcgcagtcttcgactggcgagtcgttcgccgcgaaacgcggcgagaaaagtccgcattctcgcttgcagcggaacaagaacaaccgacagcccgcgtgcccggagcgggaggctgcatagtcttgttcttgctgcgcccgctcaacgcgggccggaggttgttcccgcgaaagcgacatgcggatggttttggtacttttaacttcgctacgctcgttttcctccttctggcatggcatagcccgcaagcggtctctgctcgtgctgcgtgcgtcggttgccatcaaaagtacagagaaagccgcgacgatgtcgcgggagttttgtaccttttttccgcaaaaaggtacccaaaaactccccggcagatgccttcgcctacttcgtcccgtctaacgttggctccgggcgcccgcctaaaaggcgggtttaaggggcgatgggccgcagaaaggatcatatccgatacgacgctctcactcttaaaaccggcgtcttacgccggcgctcgcgcttttagccgggccttcgtttcacggctccggcatcgggccggaatcgttcgccgcggaacgcggcgggaggaggtgcaaaatggcccctttcgcaacctgaaaccccggttcttaaccgggcgcagaaccgggcggagagcgggccgaagctgccagtcgcaatgcaaatcccggttcttaaccgggcgaacgcgcgaacaaggggtgttcgcccatgttcgcgtgttcgcgtgttcgcaggtaaaacggatttttaagcccgggcctgccgccgccatcggaggtaacccgccacggccagcgccgagtagagggcgtaaagccccgcggtgtagggcaggtccttatagaggtaaagcccgacggtcaccagatccacgaccagccacacgagccattgctccaccagcttgcgcgacagcatccacatcgccacgaccgacagcgccgtggtccccgcgtcccagaagggtacggtgctgtccgtgaagcgggtcagcagcaggtacagcccgatgtgcgccgcggcgtagacccctgcgagcgccgggaccgtccgcaggggcgtgtggccgatgcgcagcgcggcggcccgctttgcgccctccgcatcttcagggccggtcagcccggcgtccgtttttcggcccctcctgcgccacacgagccacccgtacagccccgccagcacgtagtaagcctgcatcgagcagtcggcatacagccccgatttgtagtagagcgccccgtggatcagaggcatgacaagccccacgatccacagccggatgtcggcgcggtattcgagccagaggtagagcaatcccaacaggacgccggcgatttgcaggaggagttttatgtccattgtttcaacattcgtattgtcattccgaagaggaccgaaggtccgacgtgggaatctgctggaagcgttgtaaggtcacgactttcgcccggattgccacggcatctgcgacgcctcgcaatgcacgaagtacaattatttagttttcagagctgaaattcggtttcagcggcgttgaaatcgcgcgttttaaaatttcaccgtgacgttcgccagcacgttcagcggcgcctgcgggaagtagtaggcctcgtcgatgcgtacgggcgcggggccgctccacgtgtccatgtacgaatacccgtagccgttgctctcgtattccgcattgaacaggttgttgatcagcaggcccagccgaacgctgcgcgccgaacgggtgcggaacgtataggcgaggttgaggttggtcacgcagtaggcgtccagcgacagggcgtcgttctcgttgttggtgaaatactgcttgccgacgtgctgggtgtggaacacggcttcgaatccgcggtggtggaaattcaggaaggcgttggcgatgacgtcgggcgaataggcgatggtcatgtcgcccagctccttgccgtaggtggggctatccttcagtgcgtcgacgtagctctcgatgcggttctgcgagaaggtggcgttggcccccacggtgaaccacccggttgcgcgccacgaggccgacagctccacgccccggcggtagctgtccgggacgttggtgttgagggcgtcgctgccgtcgttcaccatgcccgtcggcacgagctggtccttgtacttcatgtagtagagattcacccccagcgagaggcgcggcgccgtgtactggtagcccagctcccagtcgtagagcttttccgacgaggggtaggtgttcgcctcggcgaacatatagcggtcggtgaagtcgctgcgcgtgggttccttctgggccacggcgaacgagaggtagaagttgttgcgctcggcgagcgtgtagctcacgccggcgcggggattgaagaagtggtactgtttgtccacgtcgatgggctgcatcccgacctcctccgaaacgtagttgtcgttgacgccccaggcctgatagctgacatagcggtactggaggtccgcaaagagcctcaaccctttggccacggaccagttggcgcgagcgaagaggttggcgtcgtgcttgtccacgtcgttgtcgtaccagcggccgccgatctggctgccttccagtccgtccacccagtcgagcacgccccagtgggggcaggagtagtagctgtacgaaccgccgaaggcgaggtcgagcttccgcaccgagtaggccgccgaggcgttcagacctccgaggtggttgcgcatgatcttctcgcggacgaggtcggcctcctttccggcagcgacgtcggccgggatattgaggtattcggagagcgtgcgtgcgtccttgtactgcttgtagaagccgtagccataggtgtagaatcccgtggcgttgagggtccacttctcgttgaaacggtgggagagcaccagctggttgttgatttgcaggtagttgtccgtctgatcgtcgtaatagtctaccgtggcgcgctgccgctcgccgtccttcatataataataggagtgcggtccgttcgaggtgtagtacatgccctcggtgtggaacctccggccgttgagacgcatctcctctttcgtcgcgcccgtgtaggtgagtcccgttttggccttgccgccgaacgaaatcagcttgagcatcgtgttgccgttgtagtagccggcctggaacatgtaggatttgaggtccgtggctccgcggtcgatgtagccttccgagccgatgtgcgtcagccgcgcgtcgagggtccagtggccgcccatcaggcccgaggagatgtgcacggcctgcttgttggtgttgtacgagccgtaggagagcgacgcgtcgccgccgaattcggtttgcagggcgtcggtcgacatgttgaccgctccgccgaaggctcccgtgccgttggtcgagatgccggcgccgcgctgcacctgaatgcttcccacggccgagacgaggtcgggggtgtcgtaccagtacatcgagtgcgagtcggggttgttcatcgccacgccgttgatcgtgacgttgagacgcgttgggtccgtgccgcgcaggcgcacggccgtgccgccgatgccgatgcccgtttcgttggtggcgatcatcgagggggtcagggccagcagcgtggggatgtcggttccgtagctgttgcgggcgatctcttcgcgccggatgtcggagtaggccacgggggtgttcggggttgcgcgcgtggcggtcacctcgacctcctgcaagcggtacattctgaccgaatcgccggcgttttggttggcgggctgcttctcttcagcccgcagctgtgcggccgagcagagcgcggcggccgcaagtgaaagaaaaatccttttcatcgttaaactttttgagttaatggactgaaaaggggtatgtgttgttgattacgcttcgtcccggtctcggcattacccgtctccggttcaatgggtataatctcagcctgacagtaaggcacccctttggaatatcgggtgcaaaggtaagtaataaaaattaaaaattaaaaattaagaattaaaaattgtcggaaaggatacccgtaaatttcgatgtatctggtgccgaaaataagttcggtcctccaatttgtcgaaacgcacagtgcgattttccgcaggtaatttttaattcttaatttttcatttttaattccttagaacgttccgaagcggaaaacgatcttctggcagtaggtttcgccggggcggagcagcggcgaggggaattcgggatggttcacggcgtcggggtagttctggcactccatcgccacgccgtcgtagtcggcatagcggccgcccgacttggtttcggggcatccgcccgcgagccagttgcccgtgtagatcatcacgctgggctgcgacgagagcaccgtcaccgaacggcccgaccggggttcgcgcagggtgccgacctcgcccagaatattgggcttccagccgtcgacgacgaagggatggtcatagcccttgaagtcgcggatgtggttgaactccgacgagatgccggggcggaaagagcggaattcccgaaaatcctgcggggttccggctgcgtccaggagcttgcccgtggggatctggcgttcgttcatttccagaatcttcgagctgttcaggcgcagttcgtggtcgagcaccgacccgctgccttcgcccgcgaggttgaaatagacatggttggtgaggttcaccacggtcgtcttgtcggtccgtgcgaggtaggtgatctccagcgcgttgtcgtcgtcgaaatcgaatacggcctcgacgcacagctcgccgggatagccctggtcgccgtcctccgagacgagcgacatcaccacgcggttggtctccacgcggctctcccagatgcggttggcgaagttcttcgttccgccgtgcaggtggttcacgccgttgttgacctccagccggtactccttgccctcgacggtcatctgcccgaaggcgatgcggttggcgcagcgtcccacgctctttcccgaggcggctccgtcgaagaagtagccttcggggtgtttgtatcccagcaccacgtcggccatgcggccctcgcggtcgggcatcttcaccgagacgatcgccgcgccgtagttcgtgagctgcacttcggctcccgagtcgttgcgcagcgtgtagcgaatgattgcctcgccctccggggtcatgccccagacgtgttgttcgatttgtaccatagtttaatataagttcgacggggttaggttgtttttagatcggagcgattttgtctatgaacccccatcgaacttatattacggcgtttttaacgccggggctcatgttgaaaatccctctgaatcgcccttttcaaagggcgactttactctattgcgggttttagattggtcagcagattgtcgatacgcttcagacactcctctttaccgatgaacgacgttacgtcgtacatgcccgggccttttccggcgcccacgagggccagccgcagggtgttcatcacctggcccatgccgtagcccttctcctcgatccaggcgtggacgatgcgttcggtgttctccagcgagaagtcgtcgattcccgccagcacgtcgcgcaactcccgcagaatggcgggattctgccccttccagtacttgcgcacctgcttttcctcatactcccggggagcctcgaagaagaacgacgtgaggtcccacagatcggtcgtgaacgtcgcgcgctccttcataatgcccgcggctttgccggccacggcgtccgaaacctcgatgccgtggctgcgcaggacgggctggtagagggccgccagttcggcgtcggtcttgtggtgcatgtactgggcgttgaaccaccgggccttgtcgggctggaatcgggcgcccgatttcgagacgcggtcgagcgagaagctgtcgatcagctcctgcatcgagaagatctcctgctccgtgccggggttccagcccagcagcgccagcatgttgatgaacgcctcggggaaatagccgtcctcgcggtagccgtgggcggtctcacccgtcggagaggtccagaagagcggaaataccgggaatcccatcttgtcgccgtcgcgcttcgagagcttgccgccgcccgtgggtttgagcagcaggggcaggtgggcgaaccggggctgcacgtccgtccacccgaaggctttgtacaggaggtagtgcagcggcagcgacggcagccactcttcgccgcggatgacgtgcgacacctccatcagccggtcgtcgacgatattcgccaggtggtaggtgggcagcgcgtcggccgatttgtagagcaccttgtcgtccagcgtcgaggtgttgacctccacgtgtccgcggatcaggtcgtccatcgcgaccgtttcgttttcgggcatccggaagcggatcacccactggtcgccgcggtcgaggcgcgccttcacctcctcggcgggcagcgccagcgacgtggccagcttttcgcgcaccgcataattataggcgaacgcctcgccgcgcgcctcggcctccctgcgcagggcgtccaattcctcggccgtgtcgaaggcgtagtaggcccagcccgcctcgacgagttgcagggcgtatttgaggtagatttcgcgccgctcgctctggcggtagggggcgtgaggccctccgacgcccacgccttcgtcgatctcgatgccgcaccatttgagtgattccagaatgtaatcctccgctccggggacgaaccgctgcgaatcggtgtcctcgatgcgcaggatcatcgttcccttgtgccggcgggcgaacaggtagttgtacagtgccgtacggacgccgccgatgtgcagcggcccggtggggctgggcgcgaagcgcacccgaactggtctttccatagctgtattctttaatttttttacgatcccgggttgcggcgtcagacgttgaacaggaagtgcatgatgtcgccgtcctcgacgacatactccttgccttcgatcgacagtttgcccgcatcgcggcacgccttctccgaacccaaggcggtgtagtcgtcgtacttgatgacctcggcgcggatgaaccccttttcgaaatcggtgtggatgatgccggccgtctgcggggctttcatgccgcgcaggtaggtccaggcgcgggtctcgtcggccccggtggtgaaaaacgtttcgaggttgagcaatttgtaggccgatttgatcaggcgcgccacgcccgactcctccagtcccaggtcttcgaggaacatctgccgctcgtcgaagtcttccagttcggcgatgtcggcctccgtggcggcggcgatgacgagcatttcggcccgctcgccggcgatggcctcccggacggcctcggtgtaggcgttgcccgtcgcggcgctcttttcgtcgacgttgcagacgtacaacacgggcttgtcggtcagcaggttgaggtcggcgaccagtttgcggtcctccttgtcgagttccacggtgcgggccgaaagcccctgttccagcaccgccttgtactgcaagagcaactccacggcgcgcttggcctgcttgtcgccgcccgaggtggcctgcttctgggtcttggagagccggttctcgacggtttcgagatccttcagctgcaattcggtgtcgatgatgcccttgtcgcgcacggggtctatcgagccgtcgacgtgggtgatgttgccgttgtcgaagcaccgcaggacgtggatgatcgcattcgtgttgcggatgttgcccagaaatttgttgcccagaccttcgcccttcgaggcgcccttcacgaggcccgcgatgtcgacgatttcgatcgtcgtcgggaccacgcgcttggggttgtcgatctccgcgaggcggatcagccgccggtcggggaccgtgatcacgcccacattgggctcgatggtgcagaaaggaaagtttgccgcctgtgcctttgcattggacagacagttgaaaagggtcgatttacccacgttcggcaagccgacgatgccgcattgtaacgccatttattcgtttcgtttatgttgctgtcagacaaattgcgcttatcgtgaaacaagcccacaaagatacgaatttcttttcaataatcggagacgctcgcgggtaaaagcggaaagggggatggtttccggctctgggcgcggaaaaaagcgcttctgtccgttccgtttatcccttggcaaataaaacctcttcgccagttggcgaagaggttttatttgccggcagcaaggctggctattcggccagcgaccattcgatcacgaccgggaagtggtccgaggggtatttccggttgtaactgttgttgacgatgcgccacgaaacgaccttcgtgtccttcggcgtgacgaagacgtggtcgatgcgcgacgcagcggcgggaggcgtcgagatgtatttgtagccgttgtaggtgggccagtctccgttggtcttggacggacagcggacgtagctgtcggcaaggatgcctgatccggcgatcgttttgtaggcttcggtgttttggttcgaattgaagtcacccgtgcaaaaggccggtttgccgcctgcgatctcccggaccttggccaccagcagtttggcgctctcggcgcgggccgtggtccctatgtggtcgaagtgcgaattgaaatggtagaattcccgtccgttcgcgcggatgcggaaatgcacccagttgcacatgcggggcgaataggagtcccagcctttggacccgggggcggaaggcgtttcggagtaccagaacgatcccatatccaatacttcgaatttgtccttgcggtagaaaacggggttgtagtggcgtcgttgggccgttttgtcaccgatgacgttttctccgacccaggtgtatccgtcgaggaacggctcgatgtccttgatctgggtcagataaggctcctgcgctccgaagatgtcgaacttctcgctctggagtagttggcgaagcaaatcccggcgggtcgtccatttgttgtcttgatcggaagagttgtcgtactggatgttgtaggtggcgacgcgaatcggatcgagccactcttttccaggtgcaggggcgggtgcgggatcgtcgtttcccgaactgcacagcgagaagagcggcaggcagagcaggaacagactgaaatacggttttcgtatcatttttccgaaagagattggtttcgaatttaagacgaactgtttccggttttgtccccgggggggggcgaaaatttgctatttcgcattttttattcgatttttaccgcttgcagggggacaaaccggacggttttccgttatatcgaatgaccgaccaaaccaatgaaccgaatgtttcggcaacgcaagtacgacacccgacgaatcgaccggcagtatgccgaagagaccgacgtatatgttatgttgtataacagttacgccgatgcgctctatgcctacggcatggggttcggtttcgacaacgaaacggtcaaggatgtcatccacgacatattcctcgacattatgacccgccaggtcgacctgggccgcatcgtcaacatcaaggcctaccttttccggatcgttcacaaccgcctggtcgatctgcaccgttcgcgggtggacaaatgcgacctttcggaccgggagccgggattgcgggtgtcgctgacctcgctcgacgcgatgatcgaatcggagcacgtgctgcgcatccgccaaacgatcgagtcgctgctcaaccagctctcgcccaagcagcgcgaggcgctgctgctgcgcttcgtctacgagatggagtatgacgacatcgccgtcatactcgacgccacgccccacgccgtccgcaagttcgtgtcgaaggggctgggcaaacttcggaagggcagggagtgcggcaaaacgatgaaaatagccacttgacacggcggacgctgttttttgcggttcgagggggacaaaacggcggattcgccgtcataggggagagcgcggcgccgcagccgcagcatgcagtttgaagattacgttggaatcaatgataaaaccggacgatattaagaagcacacggcggagttcttcacctccgacccggacttcgttttgtggtgtctcgatcccgagcgggcgcaggacggctattggtgcggttacaccgaacgccatccgcaggacctggtcgaattcgagcgcgccgtgagcctggtgcgccgtgtgggcaagacccatcccgcgctgccgtccgtggagaaacagttgctgctcgaccgcatcctgaccgaccattacgcccggcgccgttttgcagcccctccccgccgccgcaaccggacggcgctcttcgccgccgcttccctgctggtcgccggcgtcgtggcggccctgttctggagtgcggatttcacgggttccgggctgccttcggccgaggcctatgaaaacatcacgctcgtgacccgcgaaggcagccgcgaggtgtacgacgacatcgcccgtatcagccttacgcccaagggcgaaatcctgatcgacggcaaggagaacgaaggggcggagaccgatcgcaggacgccccggcaggaggtgcgcgtgcatacgagtgagttggtggtccccaagggcaagcgcgcacatctgcaactctccgacgggacgcgggtgtggatcaattcggcgtcggtgctccgtttcccgtcggcgttcggggacacgcgcgacgtcttcgtcgagggcgaagcctatttcgaggtggcgaaggatgcgaaccgtcccttcatcgtgcacaccgaccattttgcgacccgcgtgctgggcacgtcgttcgacgtgacgaccgcgccccgggccgacggttcgtcggccgtggtgctggtcgaaggctccgtggccatcgacgtggccaacggcgaatcggtgacgctgaatccttcggaacgcttctcgatgaaggacggcagctattcggtctacgaggtcgatccctataaatacatcagttggaaggacggactgttgttcttcacctcgaacacgctgttcgaagtcctgcaaaaggtggctgcgttctacaagatcgaaataacctgctccggggagatcgggagccggaagtgtaccggcaagctgatcctgttcgacgacctggacggcacgctcgacgtgctctccgacattttccggatcgcctacgtccgggggcccgacggctcggtggcggtgaggcctgcccccgacgattgcgccgacgccgtatatcgctgacaaccaattccagtcttaaatactaaccttaatactgttacttatgaagaaacttttctttgtgaggagtggctcgacatgccgtatgctgcggattcttgcggcggtgatgctgttgcttccggtgaatctccagcccgtccgggcctcccggcaggacgccggggccaaatcgtcgctgaccgtgaagatgaaggacgcaacgctgtcgagcgtctttgccgaggtcgagcggaccagccgctacgccttcatttacaccgacgacgtgcggccgctgctcgaccgccgggtttcggtttcggtcaggtctgcgaccatcgacgaactgctgtccgcggtcctcaagggaacggagctgaccggacgggtgcgcgaaagccaggtgatcatctcgaaagcgcccgctcggaaaaacgccgccgtcacccccccccctcccggctgcgaattccggtagggaaatcgtcttgcaggggacggtgatctcttcggccgacaacaagcccatcgtcggtgtttcggtctatgtcgaggggacgaccgtcggcgccacctcggacatcaacggcaactacaccctcaaggtgccggcgggaacgaaacacgtcaccttcgcttttctgggctacgacaccaagaagatcgccgtcgccgatgtcgaactgttcaagctcgtgacgctgatcgaggcgtcgaacgtcatggacgacgtggtggtcgtggccttcggcacgcagaagaaggagagtttggtgggagccgtgcaggtcgtgcgtcccagtacgctcaaggtgacgtcgagcaacctctcgacctcgttcgcgggcaagatcgccggcgtcatctcgacccagtcgtcgggcgaacccggcgccgacggtgcgaatttctggattcgcggcatctcgaccttcggggctaacaaatcgccgctgctgattctcgacggcgtggagatcgtctcggagatgctcaacaacattccgcccgaggcgatcgagtcgttttcgatcctgcgcgacgccacggccacggcgctctacggttcgcgcggcgccaacggcgtaatgatcattaccaccaaaaacggccgccagtcggagaagatggcgatcaacgttcgtctcgagtcgggcatttcgatgccgacgcgcgtgcaggacatcgccgacggcgtgacttacatggagaactacaacgaggcgctgcgcacccgcaccccggcgggcgaaacttatgtgcagcacttttcggacgagaagatcacgggcacgcgcaaccggctcaatccctacgtctatcccgacaatgactggtattcgatgcttttcaaggattttacggtcaacgagaacatgaatctcaatgtgcggggcggcggcaaggtggtcgactatttcctcaatgcttcgatcttcaacgaaaacggtatcctgaagaagcccgcggagtcgaaattcaacaccaacatcaattcgcagaaataccttttccaggccaacgtcggcgcgcagctcacccgaacgacccgcgtgagtctgaagatgaacacgcaactgcttttctggcaccgtcccgtcgaagaggtgaaagacctgttctactatacgatgcgcgccaatccggtcgcttttccggccatctatcccaaaggctccgtggaggatctcgacgacccgattttcggaaatgccccttcgtgggacggtggttctacggacatcaatccttatgccctgttgagccgcggatacggacagcgccatacgcagtacatcaccacgaccttctcggtggaccaggacctcgatttcgtcaccaagggactgaaagtccggggcatggtctcgttctacaacaagacctatgcggcgacttaccgttctttttctccctattattacgaaatgaccgactataccgacaacggcgacgggactttcgactacaacctgcaaagcatcggcacgcccggatcgtcctatctgggaacctccacggggcggaacggttaccgtgagatctcgttgcaggggcagatcgaatattcgcgcacgttcggcaaacacgacgtcaacgccctgttcgtctaccaccagaaggagaaggtcgacaatcagcccgccaatgatgagtacaaggtgctcccttaccgcgagcagggtctcgccggacgttttacctatgggtacgacagtcgctacctgatggagttcaacttcggctacaacggctcggagaacttcatatcgggtcgtcgtttcgggttttttccctcgatcgccggagcgtgggtcgtgtcgggcgaaccgttctgggacggtatccgcagcaaggtgaacctgctgaaaatccgtgcttcgtacggcctttcgggcaacgactatctggccgacagcagcaacaacatcgtccgtttcccctatctcacgacggtcaacatgaacaaggcgctctacgtgtggttttcgcccaacttcgtcaagcagaccggacacgagatcaagaccgtgggcaatcccctggccacgtgggaggagagcaccaaacttaacgtaggacttgaactgggactgttcgacgccctgacgctgaacgtcgacgtttacaaggaaaatcgtaccggcatcttcatgcagcggcgttcgctgccctcgacgatgggcctttcgggcgtcacgccctacggcaatctgggtgaggtggagaaccgcggcgtcgatgtttcgctcgaatacaacaaggcgttcaacaaggacctgctggtctccgtgcgcggaacgttcacctatgcgcacaacgaggtgaaggcccgcgacgaggcgaaatacctgcccaacaaatacaactccgtgctgggcaaacccgtcaattcggtttacggactggtcgccgacggccttttcgcctcgcaggaggagatcgacaactcgccccggcagaccttcatgcccgattatctgcctggcgacatcaaataccgcgacatgaacggcgacggcgtgatcgacgccaacgaccgcacgtcgctgggttatcccaccgtgcccgagatcttgtacggcttcggcgcctcggtcaactacaaacgctgggacttctcgttcttcttccagggcacggcgcgcgtctcgctgcgcatgtacgacatgcacccgttccgcgacaatcagtattcgggcttcaacatgacgcagtacgttgccgacgaccactggtcggaagccgatcccaatcccaatgccgcctatccgcgcctggattaccgctacaacgccaacaacacgcagacctcgtcgttctggatcaagaacggcagctacctgcgcctgaagagcgtcgaactgggtttcacgtacaaaagcctgcgcgcctatctggccggcacgaatctgttcatcatttcgcccttcaaatactgggaccccgaaatgggaagcggcaacggcttgaaatacccgttgcagcgcgtggtgaaactcggccttcagtataacttctaaaattcgagcgacatgaaaaaaatcatatccattttgctgtttgcgtgcgccggagcgcttgccgcgtgcgatttcctcgacgtggttcccgaggggcaggcgacgcaggaggacatcttcaaaacctccaaggaggcccgcaagtacctcaatacgctctacacctacgcccccaacatcgcggcctaccgctacatgcccgacttctgcgccggcgacgacattatcaccgccaccaacggccagacccgttattttccctacaagagcatgctctacaacgaggagaacgccagccagacctactacggtctgtgggacgcgacgacctcttccccgtccgggcgcacgaactacgacatgtacaagggcatccgctactgttacatcatgatcgacaacatcgacgcagtcccgggcatctcgccgtccgtggccgacgagttcaagggcgaagcctattttctgatcgcctattaccactgggtgctgctgactcactacggcccggtcatcctcgtcagggggcagctggacatggggcttcccgaggagcaggtctatgtggcccgcagtccgttcgacgaatgcgtgacgttcatcgccgagacctacgaccgcgcggccgatttgctgcacgggtatccgacgcgtcccgatgccgacctggggcgcgccacctcggtggcggccaaggcgatgaaggcccggctgctgctctatgccgccagtccgctctgcaacggcaacacggagttctacgcgcgtttccgcaacaacgacggcacgccgctgatgagccagacctacaatcccgaaaagtggaagtgggcgctcgacgcctgccaggaagcgatcacgctggccgaggacaacgggcacaggctctacgaaagcccgaacgcgactgcggctgcaaccgctgccgagcgcggcgagatcaactaccacgactgcttcgtcgaaccgctctggaacacgaccgagtacctttgggcaatgggcgaccagaccggcatcgggcacttgcagcgttacggaggcgcgcgcctgaagctgccgtacagtaccgacggcttctgcatcaacatcgttccgacgttcgagtgcgtggagatgtactacacgcacaacggcctgccgtgggaccgagaccccgagaccatgcatatcgacccctatgcctataatgccgaaaaggagactgtcaaccttcatgtctacaaggagccgcgcttctatgcgtcggtgggctacgaccgcggcaagtacgccatcaacggcgaggagttcattctcaaatgccgcgccggcgagatgcagggcagtgtgctcgacgcctcgaaggagtaccagagctgtacgggctacattctcaagaagtggattcaccgccagtcggccttcaactacgacaccaagtcgtggacctaccgcaagtacgcctatccttacatccgccttgcggaactctacctgagctatgccgaggccgatttcgaatacaacgggtcgttgagcgacgcgagcctcaattacctgaatctggtccgccgccgctcggggctgcccgatttcaaggattcgtgggccttggccgggggcattcccaccggcgacgaactgcgcaaggtgctgcaccgggagcgttcgatcgaactgctgatggagggcatgcgctaccacgacctgcgccgttggaaagaggcgggcgaagcgatgtcccggcgtcccaaggcgtggaacctcgacggcaggacggcggccgatttctaccgggtctccacgatgaaggagagcggcgtacgcacgttcgaatcccccaagacctactggatggccattccgttgagcgaaatcaatatcaactacaacctcgtgcagaatcccggttactaaccttaataatccgattgcgatgaagaatcttgcgatatgcctcctgcttctgctgggagccgtagggtgcggcgacgattacgtcgtctacgagacggtggacactatggtctgcatcccgaagaacgatttccaggtcctcgaatacgatgccgcttcgggccaggcgtgcgtttacgatctctatctttacaagggcggttacaatgacgacggaatcaccgtgaaactggtggtcgacccctccgtgctcgatgtctataacgtggaaaacggactcgaactgaaggtgatgcccgacaggtatttcgccttcgaccccgaagtgcgcttgtcgggggacagggtcatggaccgcgccgaaatccgcttcgatgccgcttcgatgcttgccgacggcattgattcctcctatgtgctgccgctttccgtcagggccgatgatcagggcaaggtgcgtcccgaaaagaacagcgtaatcatccgggtcgtgatgaaataaccgtgatgcggaggaggtccggcctcctccgcatcctcaatgcaaaaaaatatgtcaaaattctacatgcggcttctgtcggtgtgcctcgccgcccttgtcctggcggcctgctcctcctcggagggcggcggtgacgacggcccgaccgccggacagatccccgataaggccggaatgacggtgaagggaatcgtgaaggacagcgccggcaatggcattgccggggtggtggtgagcgacggcctggaggtgacggcgaccgacgaacgggggatttactatctggcctccgacctcgcgcggcgcaatttcgtctttgtctccgtgcctgccgactgcgagattcccgccacgcagggctgtccgcggttctaccgcaaaatcgaccgcaaacaggccgtcaaccgggccgattttacgctgacacgacgcaagactccgtccgaccgccattcgctgatcgttatggccgacattcagctggctgccgataacacgtcggtggattcctatctcggtcatgtcgttcccgatgtgctgaaaaccgtgcaggggcttccgacggaggtttacggagtcagcctgggcgacctggtctggaacgatatgtcgcttttcccgaagtaccgtcaggggctggagacgcttggcttcacgaccttcagcctgccgggcaaccacgatcacgatccggccgagttgaccgattcgctcgccttgcagagctacgaacgctatttcggtccggcgaactactcggtgaacatcgggaaaatccattatctgttcctcgacaacatccttttcgaccatgcgccgaccgccgaagaggagtatacgatcggtcttacggacgaaatttgccgttggatcgaagccgatttgcgctacgttccggcgggcagcacgctcgtcgtctcgtcccattgcccgattctctatcacacgaagaacaccgcagcgcgcaaccaccgcaatttccagcgtttcctcgatgcgataagcccctataaggtccatgccttcggggggcacaagcactaccatgacatttaccgttacgacgacggacgcaaggtcatgcactgcatcgcccgcacgccgggcgacctgttcatcaacggcgacgtcaactgcgacggcacgccgcgcggctatgccgtggtcgaggtcgatggcgaacggctctcgtggtattacaagccggcgggcgggaagcgcgatatgcagatgcgcctctatgcacccggacgcaccaattcggcctgtgtctatgccaatgtctggggttatgacacggcctggagcgccgtggagtggattcccgcttcgggcgggcaggcggtggcgatggagcggacgcagcgcaccgatccctattacgaggaggtgctggcgacgggtgtgcgcggagggacgccgaccaatacgtggcatatgttccgggtcgatccgggcagcgagcggggcggcatggtgcgggtcaccgacagtttcgggcatacctacgaatcgtccgtgtcctggtaaatacgacattcgaacaaaaccttaaatacaacttcaacgatgaagagactttttctttttctgaccgtcgcggcagccgtttgctgtgcggcgtgcagcgacgatcccgaggtcgccgaatccaacctttcactgctcgaggataacgtgacgttcgatatgttcggagggcgcagcgtccttgaaatcacggccgattcgccgtggacggtctcctgcgacgacgattggtgccgcaccaacgtcgccgaaggttcgcacacgaagaagatcgttctgacggtcgaccagagtttcctgcccgaggagcgcacgaccgcggtgcgtttttacgccgcgggcgaagagaagcacaccgtgaccgtgacgcaggagaagttcgagccgatcctcgtgctggcggagaacggcgccgatataaccgtctacggcgccgggagcgaaccggccctgaacctgcgtgcatccgtggcatggaaaatcgagggcgcgaccgactggtgcgccgtgtcgcagtccgaagggacgaaaagttcggtcgtgaaactgttgctgaccgacgacggcgagggcgtgcgtccgcgcagcgcgacgctgaccgtctcctccgagatggagggcgtcgaaccgcagcaggtgaccgtcgtgcagcggtcgaccggagcgaatacggtcgtggtccgggcgggtgaaacccgtgcgtttccggcgcggcgcaccgacggcgcgtatgtgaagggcgttgcggcggactgggtctggaccaccgacgcagagttgctttcggggcttgactacgacgcttcccggaatgaaatcacctgcactgcggccaagtcgaagcagggcagcgggctggtcgcgctgttcgacgccggaggcgcggttgtctggtcgtggctggtctgggtcgtggacaagatgccttcggacgtgaccgtcggcggtatcgcctggcaggaccgcaatgtcggggccgaataccattcggccgacccgaaggcctgtgtgcaggatttccgctcctacggactgttctatcagtggggccgcaaggagccgttcatcggcgcgaagatcctctcgaagaacaaatattacgaggggcatgcggagtatcccgatgctttcggcgcgatgacgcgcgaggtggttttcaacgcctcccgcaccgccggctggcaggtcagcggcgaggagatgacagccgcaacggcaaacggcaatccgacgacgttctatacccggtcgtccgcagcgatgtccgaaggctggaccgagggcggcaaggggctgaacgatccctgcccggtgggataccgggtgccgacggcggccgaatggcagtcgctgcttgcctacgtggacggcaacgccgccaagaaccaggactcgggcgacacgtacagccgctggtatgcgctcaattcgggcggaaccctcatcggcccgtcgacgatgttccgcaagggcgataacggccgcatccactatccggggcgttcggcagcctattgttcgtcgacgctcgccggcggcaagccgctcccgatgtacgactggaaggcgggcgacgccacgggcgaggggacctattacgaacggaagatgaccacagcctacggcatgcgctgcgtgaaggagtgacgccgctgcgatcgcgggggcttcgggcgggagtgagtttattccgttccgaagccctttttttgcggtattttcattaccttcgcatgtcttttcaaacttttaccgatgaaaaatagcatctttaccgtattggcggccctcgtgctgtatcccgccggggcgcagcccgtcaccccgcaggaccggcggcgcgccgcggaactggtcgaacgcatgacgctcgacgaaaagatcggccagctggtccagcagcgcggaggcggcgccgtcacgggacccgacaagacggaactttccgtcgaacggctggtccgcgaagggcgctgcggcagcgtattcaacatcaagtccttcgaggagaccgagcggttgcagcggatcgccgtcgaggagagccggctgggcatcccgctgttgatcggcgccgatgtgatccacggtttccggacgatcttcccgatcaacctcgccgtcgccgcctcgtgggaccctgccgccgcggagtcgctggcccgcgtttcggctcgcgaagcctcggccatgggcatccattggaccttttcgccgatgtgcgacgtttcgcgcgacccccggtggggccgtgtctccgagggcgcgggcgaagacccctatctgggcgcgcgtgtcgccgaagcgatggtgcggggctatcagggcgacttgtccgacccctcgtcggtccttgcctgcgtgaagcatttcgccgcctacggcgctccgcaggccgggcgcgaataccatgcggtcgatatgtccgagcgggttttccgcgacagctacctgccgccttaccgggcggcgctcgatgccggggccgcgacggtgatgacctcgttcaatgacctcgacggcgttccggccacggccaaccgctggctgatgcgcgacctgctgcgcgacgaactgggcttcggcggattcgtggtgaccgactacggcacgatcggcgaactgaaagctcacggcgtggcgggcgacgatgcgcaggctgccgaactggccctgcgcgccggggtcaacatggacatgatgagcgccgcctacctgtttcatgccgccgaactggtgcgggaggggcgtatcccggagtcgctgatcgacagcctttgctgcgaggtgctggccgtgaagttccgcctggggctgttcgacgatcctttccgctaccaggcgaaggagcgcgagaagtgctattacgccctggaacatctcgatgccgcgcgccgcgtggcccgcagttcgatggtgctgctggagaaccgcggcggcgtgctgcccctgaaaaaggggagccggatcgcgctggtgggacctttcgccgattcccggtgggacctgatcggctcgtgggttcatttcgccgaggccggccggacctcgacctttctcgacggactgcgggcgcgtttcggagccgaccgtgtgacctatgcccgcggatgcgacccgcacaaggccctcgaaggcggtatttcggaggcggtggccgcagccgcgaagtcggacgtggtgctggtcgcgctcggattgaaggcgggggagagcggcgaggcggcaagccttgcgtcgcttgcgctgcccgacgcgcagcgtgacctgctggagagcttgaagcaaaccgggaaaccgattgtcgtcctgctggttacgggccgtcctatggagctggcccgtgaagcggaacttgccgacgccctgctgctgacctggtatccgggcacgatggcgggcgaggcgctggccgatgtcgtgtcgggcgattacaacccttcggggcgtttgccgatgacctttccccgcacggtggggcagattccgatccattacgacatgaagagcacgggacgtccggccgacgagtcgggcaagcccaacaaatacacttcgcgctatctcgacgtacccaattcgccgcagtattgtttcggctacgggttgagctacacgacgttcggttattcggacctgcgggtgctgacgcccgaaaccgccgtcggcggcgaggttcgcgtgtcggtccgcgtgaccaacacgggcggccgcgacggcgaggaggtcgtgcagctctacgtgcgcgatctgctgtccggtgtgacgcgtccggttcgtgaactgaaaggtttccggaaggtcatgcttcgcgccggggagagccgcgaggtgaccttcacactgacgcccgacgacctttcgttctggcgtctcgacaaaaagtggggccaggagccgggcgactaccatgtctgggtagggcacgactccgactgcacgctcggcggcagtttccggatcaccgaatgattcgtctctccggcacggcggccgacgccgcgggtgcgggacagctgcaagggagcagcggcttcggccgccgctcccttttccgtgcccggcgggacggtccggatgtcccggaaaaacccgttcggagatgtttcggacaaaaggttccggggaatggctgggctttcgcaaattttttctacctttggaggtcaaaacagtacgcaatgatggatttgaagacgatacgtgccgaactgcgcaagctgaccgcgattgtcgacggctgggagccttccggggagattccggccctcgaacgcgacctggcgctggaaaaactgcggacgctctacgatgcggtgcgctttacggaggtggaatcccttccggaattcccggttgcggagacggagcctgcggcggctccggtgcccatcgacctcggggcggtgctttcgctcgacccgacggacgaagccgtgttcgaacccggtcccgatgccgtttcaggacccgcgttcgatgcggaggcggaacccgcagagccgttttccgaacccgatacgacggtcgcggccgattctgccggggcgtttgccggggggaatcccgatacggagacgcccggaatggcggagcctgcggtgtcggattccgagccggaacttgagggggaatccggatttgagcctgatcccgaagcggcgtccgaagccgcattcgtcgccggagaatccgaaccggccgccgaatccgggccggtcgctgcgcctgaatccgaggctgcggctgaaccgtctgcgaagccggtcgctgcgcccggacctgccgctgcggctgaatcggccgtcgttccggaacccgctcctgcgccagctccggaacccgctcctgcggagaaaccccaatacatcgcgcccacgctgttcgggctggaggaggagaccgtccgccaccgtcacaaacagcgcgtcatcatgtcgctctacgatacgcccgcgcccgccgaaaagcccgcaaggcccgaaacggcggaaagaccggcggagcgtcccgaacccgctgcccgccccgaacccgctgtgacgctcgaacccgctgcccgtcccgaacccgctgcgacgcccggaccgactgtccgtcccgggtttgccgcgactcccgaaccggcggctgcgcctgcgtccgcaggtcccgggccgcagtccggaacgtccgtgccgcagtccgcggcggaacccgtcaccgtttcggaagcgcctgccgccgccgagccggaggaggccgaatccggagcgaaggaggttgcggtccctgtcggggccgtgctgggcgaggtgatcaaccacgacgtgcagacgctggccgatacgatcgctccgcggcgcgacatggcttcggaactgcgccgcggcgaaccggtcgccgaccttcgcaacgccatcggcatcaacgacaagttcctgctgatccgcgatctgttcggcggcgacggcgaagcctatgaagaggcgatcgcgacgctcaacgccttcgacgatttcgacgagtgcatgatccacattgccgagaactacgcctggaatcccaattcggacggcgcgaagtttatgatggaactgctcgaacgcaaattcgcctgacacgatggccaaactctatatcgtacctacgccgatcgggaatctggacgacatcacgctgcgcgcggtgaacgtcctgcgcgaggtggatttcatcctcgccgaggacacgcgcacgacgtcgttcctgctgaagcacctcggcatcgagcagaaactccgttcgcaccacaagttcaacgagcacgccacggtcgaaatggtcgccggggcgatcgccgcgggacgcaatgccgccctggtgtcggacgccgggacgcccggcatttcggaccccgggttcctgttggtgcgcacgtgcgtcgaggcggggatcgaggtcgagacgctgcccggcgccacggcgctgattccggcgctggtgcagagcgggtttccgtgcgaccgtttctgcttcgagggcttcctgccccagaagaaggggcggatgaagcagttgcaggcgcttgccggcgaggagcgcacgatgattttctacgaatcaccctaccgcgtggtccggtgtctcgagcagttcgccgaggttttcggtgaagaccgccgggtttcggtgtcgcgcgagatcaccaagaagttcgagcagaccgtgcgcggaaccgtcgccgaggtgctcgggcatttccgcacgaccgaacccaagggcgagttcgtgatcgtcgtggccggaaaacccaaagtccgccgcgtccgggaggacggggaggagtaactcaaatcgaaacgcaattgatggaagagaaccgtacagacgatacacaaaaggtaaaacgttcgttttcggcgtggctcggggagttgcgcgaatttatgaagggccgtttcagcctcgacgaggacaaggcgcagcgcgacgaggtcgtggcctccgtctcgaagggcgtggagttccgcggcgtcaacctctgggtgctgatcttcgccacgatgatcgcctcgctgggcctgaacgtcaattcggccgcggtgatcatcggcgcgatgctcatttcgccgatcatgggcccgatcatgggtgtcggcctcgcgctgggcatcaacgatttcgaactgctcaagaagtcgctgcgcaacctggcgctgatgttcatcgtcgccatcatcacctcgacggtctatttcttcatctcgccgctctcgtcgaacagcagcgagctgctggcgcgcaccgtgcctacgacctacgacgtgctgatcgccctgttcggcggcctggcgggcatcgtggcgcagacgcggcaggaccgcacgtcgaccgtcattcccggcgtggccatcgccacggccctcatcccgcccctctgtacggcgggcttcggactggccacggggcagttccgctttttcatcggcgccttctacctcttcttcatcaattcggtgttcatcgcgctggcgacctatgccatggtgcgttttctgcaatacgagaagaaggtcttcatcgacaaggtccgcgagcgcacggtcaagcggctgatgatggtcatcacgctggtgaccttcatcccgagcgtcgtcatcgggttccacatggtccgcgtctcgttgttcgaggccgtggccgacaaatacgtgtcgcaggtcttcaactttccgcatacccgcgtgatcgagtgcaacaaacactacgcgcagggcaagaacccctcgcagatcgagctgctgctcgtgggcgagccgctgggcgaggaggtgatcgagaatgcccgtacgcagatgcgcaatttcgggctggaggaggccgaactggtcgtccggcaggccaatacggaggacaaggtcgacgtggtttcgcttcagaagagctatcaggagctgctggaggagaagaaccgccggatcggcgagatgtcttcgcagctgaaacgctaccgggtgaccaacgtcgaggtgaacgacatctcgcgcgaagtgggggccatgatggacaacatcggggccatttcgctgaccaagggcatcaccttcgacgtcgagggcacgcccggcgatacgacgctcgtgtgcgtggtgacgccccgggattccgcgcttccggtcgaccgtgaaacgctgatccgctggttgagaatccgcaccaaggtcgagaacgtcaaacttttcgtggaaccctaatccgggcggcaggcatgaaacgaaccgatctgaccattttgcagcgcttctggctggagaccctttggctgggcgcacgcgtgttcgccgtgatgccttactggttcaagtactacgtcgtcgaaaacctgcttttcgtcctgctctactactgcctgcgctaccgcatgaaggtcgtcaagaccaacctgcggaactcgttccccgagaagagcgaacgcgaactggccgtcatccggcggcggttctaccgcacgctgtccgaaatcttcgtcgacacgatcaacatggcctacatgaacgaggagaaggggcggacggtgcttacggtcaaagacgtggagaaacacgtggaagcggtgcacggccgcgactggatcgccatgacggcccatttcggctgctgggagtactgctcctactgggggctttacgagcggtcgcagatgctggtcgccgtctaccatccgctgcgcagcaaggtgatggaggaactctaccggcggctgcgcaattacgaaaattcgatgaccgtctcgatgaaggagagcctgcgtttctacctgcgcaaccggaccggaggcatcgccggcaagaacctcgtgatggggcttatcgccgaccagaatcccccgcggcggcccgacagccgttggttccgcttcctcaatcaggatacgatcttcttcgacggtggcgagaaactggccctgcgctgcaacctcccggtctacttcgtgaagatgagccgcctgcggcggggacgctacgaaatgtccttcgaactgatttatgacggcaaagaggaggtcgccgaatacgaaatcacgcagcgttacgttcgtaagttggagcggatgatctgcgagtgtcccgaactgtggatgtggtcgcatcgccgctggaagcacaaacgaactcatgccggtcgctaaaattatcatactcaactggaacggtgcggaccacctgcgtcgtttcctgccgtcggtcgtggccgcggctcccgccggcgtcgaggtcatcgtcgccgacaacggttcgacggacgactctcttgcggcgctcgccgccgggtttccgtcggtcacggtcctgcgcatggaccgcaactacggctttgccggaggctacaaccgcgcattggagtatatcgaggccgattattacctgctgctgaactccgatgtcgagacccccgaggggtggcttgcgccgattctcgactgtctggaccggaatcccgacgtggcggtcgccgcgccgaagctgatctcctgcgccgaccgcacggagttcgagtatgcgggggctgcgggcggtttcatcgactacctgggctatcccttctgccgggggcgcatcctgcgctgcgtggagaaggaccggggccagtacgacgacgagcgcgacgtgttctgggtgagcggcgcggctttctgctgccgggccgacgtgttccgtgcgctgggcggcttcgacggcgatttcttcgcccacatggaggagatcgacctctgctggcggatgcagctggcgggttaccgggtgcggatcgtgccccggagcagggtctaccacctgggcggcggcacgctccagaccgattctccggccaaggtcttctacaatcaccggaacaatctcgccatgctttacaagtgcgcctcgcccgcacagcggctttgcgtggccgttgcgcgcccggcgctcgacctgctcgccgcgctgtcctacctcatgcagggccgccgggacaacttccgcgccgtgttccgcgcctggggcgacttcatccgctggcacggggcgctggcccgcaaacggcgtgagatccgcgcgaaccgcaagggctccgccgcggaaaacatctaccgcggctcggtggtgctgcgctatcttttcggccggcggaccttcggcggcatgatgcgctgacgcggagccgatgtcgtcgttttcgcaacgggacttgtgcgatcttcgttttttgcgtatctttctgaaaaataccctcgcttatgatacgtgcggctcttctgttgtcggcagtcgtgtgttttttgcagccttttcgcgcgtcggcgacagggcaggctgccgaacggcttgtcgtcgggcgcgatacgatgcagttgttcgcactgccgctggcgacggcggattccgccgtgctcgcccggctcgaaaaacggctggacgaactcgatgcctccggctctacggcttgcaggcgtcgctgtatcggtgtctggcggctggacgacgagggcatcttgtggcttgagtgcgtgaacaccgaggacggcgacgtcgtattttccggagcggagctggttcccgaatttgcagcgggatcacgcgcccgggccggctggttcagcggagagatccgctatggcacggggaatctggtgtattaccaacacgatggatttatgcggaatctcgaacgcgaatgggtggctgcggtgtccgaggggcgcgtgagtgagacgaaagcctaccggaaccggctgtatgaaagaggtgcggatgcgacggacaatgcacagcgtgtggccgcggcgttcgacagccttcatgtcggaaagtcgcccgatctgctgtcgctgtatgtggtctttgcagccgattccacagggcgggtggttcggatcgaccgggcgcgactgttgtcggaaaagggaagtcctgttgtcagcgatccggctgacccgctgttgcaggcagctctgcgggcgtttcgctcggtgtcgcgctgggatgcctggtgggtcggagagacctggaaggaacaggcgtattttattccgctgcgcagggccgggagggtttggaaaccgcgaagaggataacgatgcttattgctccggcttgcaggggagcgtgaaccagaaggtcgagcctttgcccggtcgggattcgacgccgatgcggccgcccatcgtttcgacgatcgacttcgagatcgccagtccgatgccgatgccctgcctgaacgatcccgccttgacgaaacgttggaaaagctgtccccggtgttcttcggggatgccggctcccgtgtcggcgacgtagacgtagagttccccgccgcggatttcgaacccgaaatcgacggaaccttcggaggtgaatttcacggcgttgctcaaaaggttggcgatcacctgaatcagccgtttgcggtccgtgcggatgtagcggacgggatattttctgtggaaggtgatccgcaccgggctgttctccggctgccgcatgcggaaaccgccttccagctcttccatgacggcattgagttccacgtcgctatattcgtagccgagggttccggcttcgatcttcgagagatcgaggatgtcgctgagttgctgcatcagtacctcgccgttggagcggatgatgcgcatgtactcctgtttctcggtcggggcggggtcgtccatgagcagttccgagaatccgatgatggcgttcagcggcgtgcgcagttcgtggctcatgttggccaggaagcgtgatttcatgcggtcggactcttcggcgcgaacgcgggctttctccagttcgcgctgggtgcgtttctgggccgagatgtcgcttacggtcagcaccacccggggttgtcctgcgacggtgaggaaattgcccgccacgcttacgtcgcagtcgacggtctccgtgtggtcgtcggaggtgtagagcaccatcgggacctccagtcccgagaagcctttcttcgtccggaacaccccggtgatggccgcgcggacgggacagtcggcgcacaattcgtgcgtgccgcagacgccggcgtcctcgccgttcctgcagcgcagcaggttgcccaccttgggcggcacggcttgcggtgcggttcccgtcgcggagcgatagttggtttgcagaacgttgaaatcggggtcgatcagcagcaggtaggcggctacgttgcggaatatgcagtcgttgatccggtcgcttgttcggatgtaccggcgctggtagcagatacggacggccaggaggacgcaaaacgccgccagcacccctgttcctattacgtataacaactgcatccgattattcggttttcgtttccgatcccaaaggtaggtaaaatccggtgaaataggagggtaaatgataaaaaagacatccggaatcgtccggatgtctttttttgtcggtgggggatctttctatttgttgatcttggcccacgagtccttgagcgttaccgtgcggttgaacaccagatgaccgggggtcgagtcggtgtcggggcagaagtagcccacgcgctcgaactgtacggcctggcctacggggatgtcgcgcagcgacggctcgaggtagcctgtgattttgaccattgattcgggattgaggttgtcctcccaggtctgcccttcgtccacgtcgtcggggtcctccttcgtgaagagcgggttgaacagccggatttcggcctccacggcatccgcggccgacacccagtggatgacgcctttcacgcggcggccgtcgctcgacgaacctccgcccgacatcgggtcgtaggtgcagcgcagttcggtgatgttgcccccctcgtccttgacgacctcctcgcacttgatgaggtacgaatagcgcaggcgcacctcgccgcccggcgagaggcggaagaacttcttgggcggattctccatgaagtcgtcgcgctcgatccagatcaccttcgagaagggaacctgccgcgtgccggcggcttcgtcctcggggttgttgatcgccgtgaacagctcggttttgtcgtcctcgtagttcgtgatgaccaccttcagcggattcagcacggccatgcggcgctgggcgacccggttcaggtcttcgcgcacgcagtattccagcttcccgaggtcgatcacgttgtcgcgcttggcgacgcccaccatctcggcgaagttgcgcaccgaggcgggcgtgtagcccttgcggcgcagggcgcagatcgtcggcatgcggggatcgtcccagcccatcacggcgccctcctgcacgagcttcaacagcttgcgcttcgacatcatcgtataggtgaggttcaggcgcgcgaactcgtactggtgcgaggggaaaatgtcgagtgcctggatgaaccagtcgtacagcggacggtgcacgtcgaattccagggtgcagatcgagtgggtgatccgctcgatcgagtcgctctggccgtgggcgtagtcgtacatcgggtagatgcaccatttgtcgcccgtgcggtgatgctcggcgtggatgatgcggtacatgatcgggtcgcggaacagcatgttcggatgggccatgtcgatcttggcgcgcagcaccttggctccgtcggggaactcgccgttcttcattctcgtgaacaaatcgaggttttcctccaccgaacggtcgcgccacggcgagggcgttcccggcacggacaccgtgccgcggttttcgcggatctcgtcctgcgtctggtcgtcgacgtaggccagccccttcttgatcagttcgacggcccattcgtagagctggtcgaaatagtccgacgcataacgctccagctcccactggaagccgagccactggatgtcgcgcttgatcgagtcgacatactccacgtcctccttgacggggttcgtgtcgtcgaagcgcaggttgcacttgccgccgtatttcttcgccagtccgaagttgatgcagatgctcttggcgtggccgatatgcaggtaaccgttcggttcgggcgggaaacgggtctgtatgcgcgtttcgcccccggcgatcgactcttcgatgatctcttcgaggaagttcagcgacttctcccgtgtttcgtttgtttcgcttgccatattattttttatgattcttgctgttgtaaacggttttgagcagtttcacccccacgaccagcatttgctgggttcccagggccgtgccgtcgtggtgggcggcgaactccgcgcggaccgagaccgtgtcgtcgaagaacgagcggcggtaggagagcgccgtgcggctgtacaccttctggtcggtgcggaagaaactctcggcggggtacaactcgcggccgtaagggagcggtgtgccgtcttcgagttcatgtccgtagaagaaggggtggatgttgtccccgacatagaggcgttcgtcgagcgacagtccccagcggctgatccggaaggcgaactcgcccatgcagggcttttcccacgagtggccgaaactgcggtcgcgctgggccgtgagcaaagctcccagtttgatgtcgaaatcgaagaaggcgttgaaccgcacgccgacgcagggggtgagcagttgcaggtcgacgacgttttcgatcggcgcgccctgctgtcccgcatagtggaacatcgagtagttgaacccatagtagaacgtgtcgaggtagtggcgtccggcgagcaggatgcggaacttttcgcgcgagagggtggaatacatgccctcccagtcgcagacgaactcgacataggagtcccttttgccgttgtactgcgccagcacgccgttcatgcggttgtggaagaagcgttccgactcggagaagaatgccgtcgaatagtcgtcgtcgtgcatcatgtcgcgcgtgaagataccggctgcggccgtcaccttgggcgtctggaactggtagtagaagacgggtttgatctccgaaagataggccgattcctgggttccgaaattcttgatcatgtccgcggcgatgaccagcgtgtttttctcgtcccaccggatgccgacacggggcgtcagccgggccgcgaagtccgtgcccgattcgatgtccagtcccggcacggcgaactcgttgctgccgaattccttgttgtcgaaatacattttgaaatcggttcccagcagaatctcctgtgcgtgtcctgcggcgacgcatccggaaagggcgagcaagagtaaaagttttttcataggtgtcaacggaatatagctgacaaaagtaaggaaaagattttaattttatttacttttgcccccgaaatcaatcgttccgaacccattatgcgcaaaatcaccaacgaagaactcggcaggccttcggccgaggagttcgccgcgatggaaaagatgcctgtcacggtggtgctggacaacgttcgttcggcccagaacgtcggggcctttttccgcacgggcgatgctttcgccgtggagcggatcgtcctgtgcggcatcaccgccactccgcccagccgtgacattcacaaaacggctctaggggccgagatgaccgtgccctggagttattgcgcttcgaccgtcgggtgcattgcgcagctgcgtgccgaaggatatgcggtctacgccgtggagcaggtcgagggggccgtgatgctcgatgagtttcgcgccgtgccgggggtgaagtatgcgctcgtcttcggcaacgaggtcgacggcgtgggggaggaggccgtcgaccggtgcgacggggccgtcgaaatcccgcaggccgggaccaagcattcggtcaacgtctcggtgtcgggcggcgtcgttttatggagtttcttttgccaaatccgtccgaagcgttaactttgccgcgttgtaaaacttaaaatctgaaaaaatgtcagtagaaagcaccgtccgcgcggtaacgacttaccgcctgacggagatgaaacagcggggcgagaagatcgccatgctcacctcttacgactattcgatggcgaagatcgtcgatgccgcgggtatcgacgtgattctcgtgggcgactcggccgccaacgtgatggccggttacgagaccacggttcccatcaccctcgatatgatgatctaccacgcccgttcggtcgtgcgtgccgtggagcgggcgctggtcgtcgtcgacctgccgttcggaacctatcagggcaactcgaaggtggcgctcgattcggccatccgcattatgaaggagaccgaggccgacgccgtgaagatggagggcggcgaggagatcctcgaatcggtccagcgcattctctcggccggcattcccgtcatgggacacctcggcctgacgccccagtcgatccacaagttcggaacctacgccgtccgcgccaaggaggaggccgaggccgaaaagctgctgcgcgacgcgcacctgttgagcgaggcgggctgtttcggcatcgtgctcgaaaagattcccgcggcgctggccgcgcgcgtgaccgccgagattccgaccccgacgatcggcatcggcgccggcgcgggctgcgacggccaggtgctcgtgatccacgacatgctgggtatcaacaaagggttctcgccgcgcttcctgcgccgctacgccgacctgcacacggtgatgaccggtgccgtggagcagtatgtcagggatgtgaaggagtgcgatttccccaacgaaaaggagcagtattagtccctgattccttatacacgcaagccccggctggaacatttcagccggggcttgcgttgcagaaggctaaagaaggctatttgatcgtcttgtgcagggcctcgtagaaatcgggtccttcgcccgcgtattttccgatgatgaggccgtcgggaccgatgatcaccttggtggggtatccgctgacagcatattcgacggagatgtcttccgctgccggaacgtctttcggattgtagacgttgatccacggcagccggtgttcttcgaccgcggcgagccatctctccggagtgtcgttgcagtcgatgccgactatttccagtttgcttttataacggtcgtagtatctcttcatcttcgggattcctttgatgcaccatccgcaccagctgccccaaaagtcgagcacgacatactttccgcgaagcgacgagagggtgaaattcttatcgtcggcggttttcagcgtgaagtccggagcggggctgccggcgacgatcttcgcttcggccagccggatcaggcggtattttccggctttggccagcagcggttcgagcaatggcctaaatatcgagttgcgggccgcatcggcgagtcgttcgtggtatgttaaaacgctgtcgatgggtattttcgtcaggcagtaccctgcgagcgggttgtccggattggcgtcgatgtagttcatttcgcaagcccggcggcgggccatcacctgccggaaccgctcgtagagcgcttcctgttccgcgcggctttttccggccatggcatcctgcaatcgctggccttcgatccagaaggaccgcaattcctgataatggcggctgtgatcttcgttgagacgtgtgcccgaaagcgtgcagttgaaaaccgtcgagtcgatccggccccggagtacggcgtgttcgcccttgtcgaggaataatttcatgtccgaagtgctggtcgaatggcgtcttccctgatcgaattccatgagctgcatggggatgatgatgaattgtgtcggccgctcgacgggcgtgtcgtatgcaaatcgcccgttggcggcgacgatcgtgtcgtaggagatccgttggtcgtcatctcccttgaggccgggcatatcttcgatcgcgcagtgcacgatgcagagtgaatcgttggtcaggctgtcgatatgccccgtgatcgtatgtcggggtgcgcagccggcgacggcggccgcaagcaggaggagcaggtctcttttcatttcgggatggtgggtcgattttgcattcaaagataacacaaaaagtcttacgccgaacctattgatagaatgttgataaaaaaatcggcggataggtccggaaattaggccgtttcgaaaaaaatcactacatttgcgagcaacaaaaatccacgttcattatgtcttttatcaatgaaagggttcagcccgaaggacttaccttcgacgatgtgctgcttatacccgcctattcggaagtgttgccgcgagaggtcaatgtccagacccgtttctcgcgaaatatctctctcaacatccccattgtgtccgccgccatggacacggtaactgaagcgccgctggccatcgccctggcgcgggaaggaggaatcggcgtgatccacaagaacatgaccatcgccgagcaggccgcgcaggtccgcaaggtgaagcgcgccgagaacggcatgatctacgatccggtgaccatttccaaggaccacaccgtcggcgacgcgctgaacctgatgaaagagaacaagatcggaggcattccggtcgtggatgcggacaggatgcttatcggcatcgtcaccaaccgcgacctgcgtttccagcgcgacatgtcgcgccgcatcgaggaggtgatgacgcccggcgaccgcctcgtgacgacgcacaatcccgaactctcccacgcccaggaaatactgctcaacagcaagatcgaaaagctccccgtggtggacgacgcaggccgtctggtggggctgatcacttataaggacatcaccaaggtgcaggatcaccccaatgcctgcaaggacgcgaagggccgcctgcgcgtggcggccggcgtcggcgttacgcccgacgcgatggaccgcgtgaaggcgctggtcgccgaggacgtcgacgccgtggtgctcgactcggcgcacggccattcggccaacatcgtttcgatgctcaagcggatcaaggaggtttatccgtcgctcgacgtggtggtgggcaacatcgccacgggcggggccgcgcgctacctgatcgagaacggcgccgacggcgtgaaggtcggcatcggtcccggttcgatctgcacgacgcgcatcatcgcgggtgtgggcgttccccagctgacggccatctacgacgtggcctgcgtggcccgcgagagcggcgttccggtgatcgccgacggcggactgcgttattcgggcgatctggtcaaggcgctggctgcgggcggcgactgcgtgatgatcggttcgatgttcgccggcacggaggaggctccgggcgagacgatcatcttcaacggccgcaagttcaagagctaccgcggcatgggctcgatcgacgccatgaaggccgggtcggccgaccgctatttccagaagggctgcgaaggcaacatcagcaagctcgttcccgaaggcatcgccgcgcgcgtgccgttcaagggctccctttccgagacggtttaccagctcatcggcggcgtccgttcgggcatgggctactgcggcgcgaaggacatcgagacgctcaagcaggcccggttcatccgcatcacggcttcgggcatgcaggagagccatccgcacgacgtagccatcacgagcgaggcgcccaactattcgagcgaacggtagatgggactcccggtttcgaaatacgactggtggattctggcggcggcgttcgcactgttcgccgcatggctgatcacccgccttccggtgctgcgtacgctggtccttgcggcggcgttgggttatcttctccggcgcgtgtgggtgggctatcgaaattttggaaagtaattgaacgactgatatggaaaaaatcctgattctcgacttcggatcgcagtacacgcagctgatcgcacgccgtgtccgcgaactgaacgtctattgcgaaatccaccccttcaacaaaattccggcgatagacgcgtcggtgcggggcgtgattctttcgggcagtcccttctccgtgcgggacgcacaggccccgactcccgacctttcggccatcaagggcaaactgccgctgctgggcgtctgctacggcgcgcagttcctcgcctcggctttcggcggcgaggtgcagcccgcgcccagccgcgaatacggccgtgcgatgctcaccgtgggcgacgcctcggatgcgctgatgcgcggccttccggcccgcacgcaggtgtggatgtcgcacggcgacaccattacgcgcgtgcccgacaactatgaactgatcgccagcaccgaggacgtgcgcgtcgccgccttccacgtcgggggcgagcagacgtggggcatccagttccaccccgaagtgtaccattcgaccgacggcacgcagctgctcaaaaacttcgtcgtggacatctgcggctgcgggcagtcgtggacctcggagggttttgtggaggctaccgtgcgcgaactgcgcgagaagctgggcgacgacaaggtcgtgctggcgctttcgggcggcgtggattcgtcggtggcggccgtgctgctgcacaaggccatcggcaagaacctctactgcgtcttcgtcgactcgggcctgctgcgcaagaacgagttcggggaggtgctggagtcctataagcacatggggctgaacgtcaagggcgtgaatgcctcggccaagttcctgggcgatctggcgggcgttacggaccccgagcggaagcgcaagatcatcggccgcgacttcgtggaggttttcaacgaggaggccattcagatcaaggacgtcaagtggctggcgcagggtacgatctatccggatgtgatcgagtcgtgttcggtcaacggcccttcggccacgatcaagtcgcaccacaacgtcggcgggcttcccgagaagatgaacctgaagatcgtcgagccgctgcgcctgctgttcaaggacgaggtgcgccgcgtgggccgttcgatgggcatttccgaacagctgatcggccgccatcccttcccgggaccgggccttgcgatccgcattctgggcgacatcacgcccgagaaggtcgaaatcctccagaacgtcgacaaaatctatatcgactcgctgcgcgccgccgggctgtacgaccaggtgtggcaggcgggggctgtcctgcttccggtgaagagcgtcggcgtgatgggcgacgagcgcacctacgagagctgcgtggccctgcgcgccgtgacctccacggacggcatgacggccgactgggtgcacctgccctacgagttcctggccaacgtgtcgaacgacatcatcaacaaggtcaagggggtcaaccgcgtagtctacgacatctcctccaaaccgcccgcaaccatcgagtgggagtagggggattcccgttatgaaaaaggaccgcatccgcgggaaattcactgttgtaaacgaggtttcggtttccagaccgtcgcctcgtttgcttttgtttatatgcatcgttctgaactgcaatccgcagcgggcgtttcgcctattccgaccgtcgtcatggaaattccgaaagaggtctgcaacctcaaggaccgccgcagcgacctgtacgaggtgcgggtgaaaaaatgaaggacacggtgacgggcttgaaaacggggagcgcatgcgggccttgattgtcggggcctgatgcggccgggcattatgccgcagtgtacgcgcattttttgtttaggacgggctatggaaaagccctgggggcgatgcccgatatgattgtttcgctgtaaacagcgtgcatggctttttgtgaatcttcttgccgcatggctaaataatgagccggcgcagacggtagacgtaatggtctacggcatgcagtccggcagcgaaaccttttctgtgcacccttgcaacgagtccggcaacgcccgaaataccgtatgtgacgcaacacattgataaaaacgcagcacgcgagcgcccttgggctccgcgctggaacatggatacggacgtgcgtgctttttcgcactcctgcaagacaccggtaagacttaaatcggaattatagacgtattcacattgccattggtcggcaagtaaattccccccccccacgggttaggaacgtttcattcgtgaatttccatggagcgtccggcctgttccccgactccttgcagagcaggcaggccatgaaaaccgttagcagtatgaataccgatttacgcattccgacaaactgaatccatatacaaaattaacggttcatacgggaccggcaaatttttcggcgatttatgccggaaacggagatgaatccgtccgaatgcagcatattgccgtatgcttcgatcggattctgttcgggaatgggcgagaaggcgagagactgcatgttgtaattcagcatgatgcgcaatgaaaggcaaaaaaagtaaacgaggcgacggcctggaaaccgaaacctcgtttacgatagtcaatagtgaactctccgcggatgcggtcctttcttgccgctgcggggttatttcaccgagacgggcagcgtggcggcgatgtcggccgacgaggttcccagcgaaagggtgtattcgcccgggttgaccttccagccgcgcgactgcgtgtcccagaacgccagcgcctgccggtcgagttcgaactccacgacggcgcttttgccgggggccagggtcactttccggaagcctttcagctcctttttcggccggaggaccgtcggggcgttctccgtgacgtagagctgcacgacctccgcgccctcgcgatcgcccgtgttggtcagcgtgacgctcactttcagcggcttgtcggcggggaacgccttcggggcgcggggtttcgaaagctcgaacgtggtgtacgaaagtccgaatccgaaggggtagagcggtgcgatgcccttggtctcgtaccagcggtagccgaccagcaccgactccttgtagtcgatgtcgtagagctggatcaggcgttcgttgtaggcgcggggcgccttgttgtagaactccgcgccggcgggcatcgtgcctttggcgggggagtcgttgaactccttctcgatggtcatgggcagtttgcccgagggcgacagtttgcccgaaagaatgtcggccagcgccgtgaagccgctctggcccggataccagccgtagatcaccgctgcggctttgtcgttccagccgcccatgcggattcccgaacccgagttgaccagcacgatggtgttgggattggactcgacggccgtgcggatgaaggcctcctcctccttgggcagcgcgaaggggcgttcgaacgactccacgtcgatcgtgcccgtcgagagcagcaccacgtcggcggcggccagctcctcgcgggagggtttttcgacgacgcggaccgcatcgccgtagacctcgcggagcgccgcggtcagcgtcacgttgtcgtagcccagcacctcggccgaggacgacgtgctgcctcccgtgcggggaatctgctcggtgaagcgtcccgtcagcaggattttgcggccttcggcgaggggcaggatgccgttgttgcgcagcagtacgatgccctcggcggccacgtcgtagccggtctgcttgtgcgccgggaatttctccagcagggcgggaacgtatttctcccggtcgtaaagtccgaaggcgatgctcgtggcgatgttggggcggatcattttctcaatgtccttttcggtgatgcggccctccttgagcagcgcgcgcacctcgccgaagaactccttgcggcccggcatctcgacgttctggccgctcttgaccaccttctccgtgtcgttcaccgacgaccagtcgctcatcacgcagccccggaatcccagctcgccgcgcaggatgcgccggatcaggtcggcgttctgcccggcccactcgccgttgaggcggttgtaggaggtcatcacgtaacccacgccagcgtcgatgccggccttgaacggcggcaggtagagttcgtgcagcgcccgttcgtcgacgatcgagttcgagcggcggcggtaaaattccgtctcgttgcagatgaagtgtttcagacacgccacggttcccgtcgactgcatgcccttcacatactcggcgaccatcgccgaggcgagcagcggatcttcgcccatgtattcgaaattgcgtccgttctgcgagttgcggtagatgttcatgcccggacccagcaggacttcgatgcctccggcgcggcactcttcgcctacggcttcggcataacgataggccagcgacgggttgaaggtcgctgcgagggagatcgggcacggaaaggccgtcgaacgctccagctggcggaccatcgtcgggtcggacaggttgtcgcgcatgtgcacgccctgcgtggcgtcggagagatagatgtagggcatgcctttctcgggcacgccgtagaagaagaacgaggagtagccgcgcatgaacgagatcttctcgtcgagggtcagctgtgcgatccgggcgtcggcctgccggtaggcctcgtcccacgctacgacctgctgggcggcggccggtgcgatcgccgcggctgccgttgcgaaggcgagcaaaagttttacggaggttttcatcgttttttgaattggtttgcgtttctgtcttctgcaaagttagcgcatgaacggcccgccggaacggctcttcggaaaaatataaatgatatgaactgtcagttttctgaaaaccagttgattgatgcttcagatggcgttgaattatacaaataaaacaggcctgataatttgcttttgcatgctttttatcgttatatttgtgcaaatccgttgcctgaaatgaaaaaactgcctctccttttcgcggcctttctcgtcgtctccgcatccggtctgcgtgccggggaaccttcggacatacatacgctgcttcgccgcctggacggtctgctcgaccgccgcgaggagttcctgctccgtcacgaagcgcgcctcgactcgctcaaatccctgctatgcggcgacaccctcgggttcggggcgcgttatgccgtcacggcggagatcgcggagcgttatttcgcctaccagagcgactcgacgatcgcctacctgcgccggaatgtcgcgctggccgaaagggcggggaatgccgacctgacgatccgcgccaaatcggtcatggcgatgtgttacagcatgaacggccgcttcctcgaagccgaccgggtgctggccggggcgaccgacacgctgcatatgagccgtgcgacgcaggcggcctattatgccgcgcagcatcgccagaaccgcgagtgccgcagccagagcgagccgggggcggagcgcgaccggtttcgggcctgcgaggagtactacgcccgccgtgcgctggaaaccaccggcgacatttcgaaacgtttctatttcgcctacctcgtcgccgtggacgaaggggattacgaccgtgccgccgcggcctgcgacagtgcgttggcatgcgctccgcccgcgtcgcacgactatgcccgggcggcgttctaccgttcggagaccgaaaggttccggggcgacgaagcggctcgtttcgaatggctcgtgcgcgccgccatggccgatgtgcagggggcggtccgcgactacggcgccttgggcggcgtggccgaagagctgctgcgccggggcgacgccgcacgggcgatgcggtgtatccgcgttgcgatcaacgacacgcaggcctacaattcgcctatccgttcgtggcgcgacatggcgattctgccccagatcgagcaggcgtacagcgagcgcaatgcccgtctgcgcgcgatgtacgtcgcgctgatccttctggcctttcttttcgccctctcggcaatcggaggcgtgctgttcgtcctgcgccagaaccggcggctcaacgccgtgcagcagaccctgcgcgagtcgaacggaaaactggccgagctggctgcgagcctgcgcgaaaccaatgccgacctgagccggcagaacatccgcatcgccgacgccaaccgcatcaaggaggtttatatcggcgggttcctgaagacgatctccgaatatatctacaaactggccgacacctaccgtcatgtcggccggatgctgcgcgacggccgttccgacgagctgcgccgcgagtacgccggaaccgatgtccggagcgacgaactgaaagagttctaccacaatttcgacaccaccttcctggggcttttcccctcgttcatcggggagttcaaccgtctgctcgccgacgatgcgcgcatcggggtccgtcgtccgggaagcctcacgaccgaactgcgcatcttcgcgctggtccggctgggcatcaccgacacggcgaccatcgccgcactgctgcactgttcggtcaatacggtgtacagctaccgttcgcgcatgcggttgcgttcgctcgttccggagcgggatttcgaacagcgggtgcagtccatcggtctcggggacgatgccgcggagctttccgggacctgatcggaacggggcctcttgtcggcgaaacacggagttttttcgctcggggtgtacgctccgacgcggaaatgcgtatatttgcagcacgcatataccgatacgatgaaagattttgcagccatagatttcgaaacggccaacggcaagcgcacgagcgtctgctcggtgggcgtcgtcgtcgtgcgcggcggcgaggtggtcgatacgttttaccgcctgatccgtccccgtcccaatttttacagccatttcacgacggccatccacggtctgcgctatgaagatacggctgatgcccccgatttcgcgtcggtgtggcgcgaaatcgaaccccgtatcgaggggctgccgctcgtggcccacaactcgcccttcgacgaaggctgcctgcgggccgtcttcgaactgtacggcatgccctggcccggttataccttctactgcacctgtcgggcctcgcgccgcaccttcggcagccgcctgcccaaccatcagctgcacaccgtctccgccgcctgcggcttcgaactcgaaaaccaccaccacgcgctggccgatgcagaggcgtgcgcgcagatcgccctgaaaatcctgtaatatatataggtgtcgcccgagaagtctgatttttacgatttcacccctgccggagagcttccggcaggggtgatttttttcgggggacttttcggacggccttttctctccgtcaaagccccagctccagctggaagcggatctcccagcggttgtaattggggtctatggacctgctccgggtgttgtacgacatgtcggcctgcactttgaggctgtggccgatgatgtagcgcgtgatgcccagcgtggtctggttccagttgcggtatccggccagcggctgcacttcgctgtccgggaacagcgtcgagttgcgcagggcgatttcccattttttgttgaacaggtagctggtctgcacgttgagaccctgcccgttgtagacgaaggctccggtttcggggctgaacagcgggtcgctgcacgaacgacccatgaaatcggtgtagaaggcgaagccccggtattcgaggatgaaatcgacgaaataggaccccaggttgcgtgtggcgtcgccgggcatcacggctccccgctgacccttcagccgcgaggccttgtggttgtaggagtaggctccggcgagcagaatcttcacccgctcctcgaattcgtagttgccctcgatgacgtcgcccttcgacttgaagcgtcccagcggatagagttccagacgccccgtataggccagccctccggtcggcgaactgccccagttgcggccttcgcccagcgtgacggagccctttgccgagaggttgaagccctcgccgtggcgcatgttgtattcgccgaagaacccgaagtcgcggtcgaggttgaattcgctgttgacgatgctccggtcgacgaattgcagggcgctcgacgagttgatccgcgcgcggttggccttgatcttggtttgcccgaagccgatgttccaggtggcgttgggcacgtagtagacgatggcgtcgcgcacgatgttcatgtcgccgccgggcagcggctctgtgtcgtaggaggtgaatcccagctggaccgagtagaccagtttgggcgaatagatgtaaccgtcgaagcgcagccgcagccgtttgacgcgggcctcggtcttggtgagcgtgaagtcgtcgtcgaacgacagcgccagaaggttctgcatgcggaagcgcatcgtcagttcgaaccagtcgtttttgggccggaaggtgatgcccttgccgatttcgatgttgggcatgttgcgcagctgtgccagcagttcgccggtcgaatcggccgcgatgatttcggtgcggaggttgcgtttctgcgccgcagggacctgcggcctctcctgtgccgcggccagcgaccagcaggcggtcagcaggagcaggatcgggaattttttcatcgtatctttctgttaattctctttcggttgcatgtcggacaaaagtacaaaaaatatgcagagtccggggaaccgcgatgcaaagttggggcgtaaatctgaaacgaatttgaaatacaggggcggcagagggctttcggcgggtaaaaagatgcggcggaagagataaaatccggaaaaataggatttctggaataaaatgtgtatctttgttgccaaacaatcgagttttgttttgaatctttctttgtaagtgtttgatcccgcagtccatcgcggtttcccccattctcaaaatcgacctcattagcttgctcttttgttgggagcggtgcgccttgtgcgcttcggtatttgcaaaaaaataattgataaatggccaaacgaattacattgggaaagagagaaagagagaaattaaagcagaccaaacgtcaggacaagcagaagaaaaaggaggagcgtctgagcggcgggagccgcagtttcgaggacatgctggcgtatgtcgacgaaaacggcgtccttcacacgaccccgcaggatgtgaagcccaaggaggagatcgacgcctcgcagatcgaaatttcggtcccgagacagtcggaaatcgaggaggaggagccgatgagcggccgggtggaatatttcaccgcatccaaaggctacggcttcatcaaggatgccgccggttccgagaaatacttttttcacatcaccaacgccccggcgggcattgccgaaggggaccgggtgacgttcgaactcgaacgcggcacgcggggaatgaatgcagtacgaatagttatcagtaacaaataacacttttttaattaacttatcaagagaatgaacatttatgtttcgcatctgagctggggcacgagcagtgagggcttaggaaatttattcatgcagttcggcgaagtagcgtcggctaacgttattaccgaccgggagacgggccgttcgcgcggtttcggcttcgtcgagatgcccaatgaggaagagggtcagaaggccatcgaccagctcaacggaaccagcttcgagggtcagacgatcacggtcaacgtggctcgtccccgcgaggagcgctcttcgggcggctacggcggcaatcgcggaggcggttacggcggcaaccgtggcggaggctacggcggcaacggcggcggttacggtcgcaaccggtactaattccggattttatttcagaacggatctccgggagagcgtttctccccataccatacggagcggggcggtttttaccgccccgttttttgtttttccctattttccacacgcccagcgacatcgggaaaaagagcgaaaaattacccgcgggacctctgtttttcccgaaaaaagcgataacttgccgccatgaaggagacggtgctcgaaaaactcaaggtgctggccgagtcggccaaatacgacgtttcgtgcgcttcgagcggcgtgacgcgcaagcatcgtgcgggcggggtgggcagcgccgcggggtggggcatctgccactccttcacggccgacggacgctgcgtctcgctgctgaagatcatgctcaccaacgtctgcatctacgactgcgcctactgcatcaaccgccgcagcaacgacattccgcgcgccgccttcacgccgggcgaactggccgaactgaccatcgagttctatcgccgcaactacatcgaggggcttttcctctcgtcgggcgtcgtccgcgatcccgactatacgatggagcgcatggtccgcgtggcccgcgacctgcgcacggtgcaccgtttcaacgggtacatccatctgaagagcattcccggtgccagccgcgaactggtggccgaggccggacgctacgccgaccgcatgagcgtcaacatcgaaatcccgaccgaacgcaacctgcaattgctggctcccgacaagaattacgaaagcatctaccgcccgatgagctacatccagcagggggtgctccagagcgccgaggagcgtacgcgcttccgccatgcgccccgcttcgctcctgccgggcagagcacgcagatgatcgtcggggccacggacgagagcgaccgcgacatcctgctgctctcgtcggccctctacggacggcccacgatgaagcgggtctactactcgggcttcattcccgtcaatccctacgacaagcggcttccggcgctcgacaaggcgccgctcgtgcgcgagaaccggctctaccaggccgactggctgatgcgtttctatgggttccgcgccgaggagatcgccgacgagcagacgccccggctggatctcgacatcgaccccaagctggcctgggctttgcggaatcccgcgttttttcccgtcgatgtcaaccgtgcggactacgaggctctgctgcgcgtgccgggcatcggggtcaagtcggcccggctgatcgtctcctcgcgccgctaccggacgctgacgcagcagtcgctgcggcagatcggcgtggtgatgaagaaggcgcagtatttcatcagctgccgggaacttactgcggggcagggcgtcaacgaactgcgccccgagcaggtgcgccgcctgctgaccgctccgcagcggcggaaaacgggtaataacgaaggccaactgacccttttctgacgcgatgctggttttccgatacgacaaatccttcgacgggctgctgtcggctctgttcgatgcctactcgatgcgggcgtttcccgaggcgctgatcggccccggggaacccgaaccgttttttacggagcgcgtccacgacgttgcgaccgacgaggcgcatgccggccgtgtgtggcggggactggaacggcggctgaccgcccgcacccgttcgatgttcgtctatgcctggcacggggagcagccgcagggcgacctgctgatgctgcgctgtctgcgccgtgttttcgacgagggcggaggcgtcgtggccgaccaggccgatcccgacatgaagtcccttttccagttggcgctcaaggtctcccacgagcgggaacgtctcaaacagttcgtccgcctccagaaagccgccgacgggacctatttcgccgccgtcacgcccgagcacgacgccctgccgttggcggtggactatttcaccgaccgtttcgccgaccagcggtggctgatctacgacaggcggcgcgattgcggctactattacgacgggcatacggcgcggtgcgtcacgctggaggacgaccggggaatgatcgccgacaaacttgccgacgaatggctcgccgaggacgagcggcagtttcagctgctgtggaaaaactatttccgggcgctggcgatcccccggcgcatcaacgaacgccagcagcgccgtatgatgccccgtcgttactggaagcatctgactgaaatggagtgaccggccgggacggggaggccggttttcggtcagacatgcaggttgaacagcttggcgatgcccgtcacgacgatctggacgccgacgcagaaggtgaagaaggcgaccatcttgttgatgacgatgctgccgctgttgccgattttgcggatgatccgttcgccctgcgacaggaacagataaagtatcaggcacatcagtacgatgaccagcgcgatgatcgcgtagaagagcaggccccgcgcccagccgttcttcatgctgaccgacgccatcagcgtcaggatgaccgagacgctgcccgggccgatgctgatgggaaaggtgatcgggtagaagatctgcgactcgatggccgatttgtgaatggggttgacgtccttgccctgcgtccgtcccaccgaggagtccgaatcgccgagccattgcagggcggtgcggcagatcagcagtcctccgcccagttggatgaccgggagcgaaagcccgaaaagcgacagcacgaaatgccccacggccaggctgcccagcccgacgagcagatagtcggtgacgattctgcggatgatcgacctgcggtcctcgtcgttcagccccgacagcagtccgttgaccaggaatccggctcccaccgggttggccaccgggaacagcgccatgaaggcggatatgaacgtgaacagaaacccttcctttaacatcttgaggctcggaactttgtattgcaggcttgagtctggcaagaaccgttccaaaccttccgtcctccgggcggagccatatcgtccggaggcggaagccgttcggtttccggatcacgcgtaatcccggtctccaacgacgacaacaatcgcagaccggaaaagtaaaaccctgcaagtcgttgatcttgcagggttttctgttttatagccgctttgcgtgtcggcttttgcggagaggacgagattcgaactcgtggtacaggttgccccgtacgtcggtttagcaaactggtgtacgggaaaaatatctgcaaatattttcacactttacagcgttcagtactttttgttgtaagtgacactacaaaagtaagttgtaattttcataaatgcaaatttatagaatgattattcacttttagaactgaaaattttcatatagataatgaacttttaaaaactattatcaaacttttaggaaattaaaaaaccgccgaagaaatcggcggtttcaattttgcggagaggacgagattcgaactcgtggagcagttacccgctcggcagtttagcaaactactggtttaagccactcacccacctctccggtcagctcaacttaaatattgctattgttgttgatagcggggacaaaagtaaatgaaaaaaggggaattaccaaataaacgagcagaaaaaaattgcatacaaaaaaggtggggataatccccacctgtaaaaagggcgcagacgacgctgatctttcgtaagttcccgaaggctcctattctatgcttacgcgagtcggcatcccgacacaatttattttatgctcacctgctgccctaatttatagtattcgtgcttttttatccatgtctttcagaaaatagcagattgtattttctgctttggcgctgacggccattgcccgtttttgagcaatagggccaaaaatgtaatgccgcaaattgggtggatgttctatgtattttgcgaaacagaacccaagatttacagaggcgtaaaattcacttggtttagtccgggcctttgaaagtacggtacgattccgctggccgctaatctttatatacccccgattcactaatgttgttctttgcatcgtgtgaattgggagtattaagtattgatgcggggttacggtatcgcgcacctgatagatatagataaatcttctgactattgtttccagatcgtgcggaaatcttatccattctccattatatttacttatcaggtctgctactcgcaccggggcaacatcgtcgtaagtccatctgggggcttcgttaaatgtcgggttcgtaaatgtcgatattcgggggtaccgctctgcaagggtattgttgattgacggggcccctacaaaatgccattgagtgcccattatagagcggttcggtattttggcccccttctgccggtgcctcgacgtgcagcgtgcgagccccacgaacaggttaggcataatccggttaaaatgctctgcgctgcacatgggccgaaaatagatgtcggcattaagcaggcccccgatttcattggtgaaatgcgtacttttgtcttgttgtttatagatcacgcggataaccaatcccggcaatttaccgtcgtcctcaacactctcactgccgctggctgcggggacgtaaagtttatgggatgccgggtcttttttaacctcaacggtgtagcctgttgtcttttgcgctgcggccactccgccaataacggtttctgttgctgcgggtagttcatacggagccggagtgttatccaaatcgttgtagtcgccgcttgtggcgacggcggccagctccggcatagccggataagccgggacatacagtcgatgcgttttggggtcgatttgcacctcaacggtgtaactctttcctttgtccccggcaataataccgcctaattgagttgctgaagccggtagtaactcctgtgtgctgtattcgaggtcattccatgccttaaccccatcgccgaatttgatacggcgtgtgtcgagttccagcccgatctcgccctctcgcaatatcggattgacggcggcccagcgtgccgcagttccgcgccgctgctgaaatctcgtgtgaatgttgattgtttggctcattttcttatgcgttgccgccgtccatgatgaaagtattgctcgcgtcctgtaaatagctggtgaggcgtgcagtcgtaaagtacagacggctgccctctgctatgtcgtcagtcgtaagagttataacgccgacttttccgtttacggataatacggcgttggccgggacgggtatgcgcttccagttcgccagcactttggggtcgttacccgcgaggataaacgcccctgccggcgcatcgcttcgcaagcagatgtcgcctttctgtacgatcttggctaacatttctgcgtcgctggcagcctcaacgacatcgacaatcgcaagctgcggcaatacggacgtgttgagtttgccggaagcatccaatatcggtacttgtccggcggtggtgccgacattgcgcgatgccgctgtccctgcatcccggattttatagagaggtagcgatggaacgtcgttttcggtaattgataaggtcgttgcgattgaaatattaccgcttccgtcgaatgatgcgctaccacctacgccgcctgtaagggcgattgtccgggccgttttcagtttgtcggccatcaaagccttatcgacatatccggtgtcgggcccggctccggctgatttcgcatatttatcttgctgcattaccccgagagtgtcaaaactttcgacggtaacaatttgctgtaataccttttccaaatcgtcactccatgtcaccatatacaacgtgggtggcgtagtcataacgtgcatgaagattgttcccggctcccattttttagcatcttcagcggttggaggatcatcaaaaagaataactttcccaagagtatttttaggcagcattgtaaatacctttgtgccatcgcctatttttagatactgcttgtccgtgcaatatcccatttcaccttttatcagtaccggattggcttttagccaattcgattcggtatcgttgcgaagaacgatctttgtttttaatgttacgtttgccatgatgatagatttttatgcgtttcctccgtcgataatttctatttcgtcatagtgttttcctatgacgcagtagtttaggtgttcatcatcccaccgatatagtttgctggcttgcttatccagatacagcatgttcggatttccgatgtttggaaagttgtgatatgttgcgaagctgcgcagtccctcggctgggatgttggtattttgtgtccctatccaccaattcccgtctgggccgatatgaggggttatgccgtcttttccgtcaattccaatacgggttacaaaatcgaaatacagccgatgcgaaagcgccgagccgtccgcaaccgttagattgccctgctggattgtgcaaatcaatttcatggtcgtatttcgcgtgcttttattagggggattgtccgacgctcggccttgagtactgcatcggtcagcgtgtcgcggagttcaatcgtcagtacgatttcaccctcgtccatatcgaccgtggctgaagctgggacatttataaagtagtgggcgctgtcgcgtcgctcgatcttcaaatctgccgatgtgtccgaacgtgctatgatgcacacgccgcgtcgtgatgtcgaaagctgggccgtaattcggtatcggtcgagattgtcaaaccatgctgacgggatgatctccggcaatacgtccggtatgtctatctcgtcctttatggccgtgaatagcatcccgaaacttgtgcctgcaattatcgcttttgtgcgccagcaattcattattatagtcttttgcggatgattatgccgatgattgctccggccagcagtccccagccgatttttcccgaggtgagccagaaccgttgccaccatgtcagcggcatgggtacagggatttcgatgcgttcgcgctcttgccggtcgattgtctgggttgttgtcgtgtctgtaacctcaacagggatgtttatcggcttctcctgcggcttgttccgtaggtcgtggaataacttaccatcgggacggataaaagcgtcagatgaggcgtaatccgtttcgaggtgcgaggtgtcggacggctcgatgatcgcgcttgcccgctggtcggggatatgcacgattatcggcacgtattcgatgcgcgtgcggatgtctactttccgatctatacgcacgctatcggtgcggctgctctggatgagtgtccggggtgccgagcagcttgcaagtccgacgatggcaaacgagaggatgaatgtcgcggtgcgcatggggtcagatttttccgtaatattttacaaagccaaaccatcggcgcttatgttggtattcgggttcgttctcgtgggcataggcttccatttcaaatgcggatgcgtggtaggcttcgtcgttccaccggtcgcgggcatcgcctcgtatcatgtgatatgcgtaggatattgcccactctccgccgtacagcaggtagtaggtgaaaggcaccagcaggagccatcctgccgaaaggtgcccgcagaaaaggtgcgcggctccatgcccgaggcaccagaggacggctcctaatacgcagcactcccaaaactggcggatgtggatgccctcatgtcgcttggtgcgggccgagagttgtgcgagtttggtaatgaccacaccgaagaacatgcaggttttgaaattgccgaaaaggaggcgctttgccagcttggagttgtaatagactttcatagttgtaggttatttgttgttgtgatattcgatacagcggacgatggccgcaacgtgcatgtcggccacacgctgacggcccgaccccgaaaagatcagtttgcaatcatctttcgtgtccatgaagaaattttcggttaagaccgtcggacaggacgtgtgcttgaggatgtagaaattttcctctttgtccgggtcgccgtcggttatgtcttttcgcatccgcttctcgggaaatgcgcgggcggcttcctcgtaaaagatcgtcgcatagttgtcggcttcggtctgaccgatggatgtccacgcttcccagccggtaccgccgcccgcgttcgcgtgtatcgacaccagcagacagtcgtttgggccgacaactcgcgcgatcttgttcactcgccgcacccgctcggccaatgatatgtcgcagatctccgacacgattaattcgcagtccacgcctcgggccgtcagtactgcatgtacccgccgtgcaatatcccggttaaactcgtattcgtaaagctgtgagccgtcgggccataccggagaacgcttgccgggcgtttctttcccgtggccgttgtcaatcaatattttcattttgggtaaggtttagtaacgagttgagttgatcgcggcgcgctttgcctttgtcggcgctgtctttgacctcgttgtatttcaacaataagccggttatttctttcgggtcttgggcattggcgagcagttcgacaagggttgtcattttcaccgctgccgaccgtatggccgtgagattctcccgcacggatttgtattccgtgtaaaccacaccgaccccggccagcccggaagcatacgggagcgaatagatgccgaacagtatggccagcaggtcaaataacattaacatcccggtaacttttccgtagtcgccgaatttctcgaacgaccgccggaacccgtggctgtccctcgggattttgagaacacgcgccttgcggatgccggtggaaaagtcgatgataactgctgctatcattacgaaccatacgacgacctccagcaagatcgcccggtggaaagcgtgtccctctatgccggtcagttcggcgaggtactgtaatatttcggattgttccataatcgttaaattgttcctgcgtcgatgtttatttcataatctttaggtggggcctcgctcgggtcgggagctaccatgaacgactgttttagggccggacggtagaaccggaataaaagcgttgataattcagcagcagcgatggcgagtttttgtaaataagttttccataaatcgctggcctgtatggataaataccactcggaaacaatcaaataacataatacattggttgcactatggtctactgcgtcgagctcggatagtccgtatagttcccgtccgtcgtccgccagacgtgccgtgaacgtaaggccgcaggtgtcgccctcaaccgccatcgggtgactatccggaacgatacgccgaaagtgatgcgataaggtggtgagggcttcggcaatttgttgatcgaaaaaggcccgttcgtcagcagttatggcgtacctgtcgaatagaggcaaccccttatcgtcggccagcgtccgggcattgtaggccgtttccgtgcatattgtttggaacaggttagctttggcccatgacaaccgaataatcttgttctctcgtgtaatcatagcatccggtatggtcgttcggtgtgggaaccgataagtttgcttcgcaaatcatcgagcgcatttccaaaaaggatttggtaatactggaataagggggcatccttaccaccataccaccacatgagcatcccgaatttcagcgcgtcttttattcggatggctgttgcttccggggccatgtcgagaatatcgcgcatacggaataacagcaggtcgggaatgaataacagccgttctacgtttttactgattcgagcccggagagcttcggcgacgctctgtaaattgaccatgaacgcatcgagcagggagagttcgagcgtatgtgtcgcagtcatactctgcccggcttccgtcgtgcggttgcggtagtccagtaatgtctgatcgacgcactcgttaaaaagtgcccggcaatctattttcacgtcgaaattcatagcagcgataatatttccgatgcgcgtttatctgcggcctgtgctccggctggttcgttggaaacacccagtaccagcgcggcgagcgtccatgcggtcacgtcgatcagtttttcgggataggtgtcgttgatccccttgtaagggatgtactcaccctcggctatatggtgatcggtgcccgtaatactggaatagcgcagcttggtgccgccatgcgtaagtaaggcgacaggctttgccataccgcctcgcgtaacggggtgatactgataggtcgctgccgggtgatcttccggcagagcatctaatacgggccgttgccagccgtccatacgcaaccgggcgagacgtaagaaatcagcgggcagatcaatttggccgcttccgtcgggattgggcctcaacggacattccgcaagactttttaccgatgaaatcgtgtgcaacggggccgtgagcaaaacccgcttgcccgcttcatcaatgaaatcgttgagcgggaaattcgggctgttagctgcgttatcttcgggataaatctcgtcgatacaccgaagcgcctgcgctatgatttgctcgcgcttcatcaccagttaataaaaagaatgttgcgtttggccgcttcgatcttgatgtcgtctttcttcatacctgcgggcaccacatagtcgaggttcgcctgtaaccatgcacgcgctgccgctactgacgttaccgtttcctcgtgtgtagccgtggccgggtcagacagcagcgtttccagatcggttgccgggttgttgggtgctgtttcctcgataggggcggttggggtggtggccttttcccagaatgtcacctgataggcaggatgctcatgcagcgcgtcgatgatggccgggtcggatgtggtgtaggtgctttctccgaccccgccgaaatatacctcgggctcgaagcgtaccgcttccaatcgcccgtcagcgcaacggacggacgtgcggtatttcttgtggttgagaacgaaaaatgttgccatgtgtcgtgggttttatgacgggagcagttgcccgctcccgtcgttgtgagtagcttatttcaccgtaagcagtgcgtgtgcatcgggattcgtcacggcgagagtgtggctctcgtcgatacgaacatcacttgagcgggacagacccgttttgtcgcgttcgagctccgtggcttccagcggtttctgtatggcccgatagacgtttgccgggtcaatcacgatggcggctttcgaatagccgtattcgttcagcaggtcatgcggtttcatcaacaactcgccgtccggagtgctgatacggtggaacgtgataccgaatacgacctcggtactgcccgcctctaactgtttctgaacagtcgaggccccggccatctgccgcccgaaatcttttccgtagaacataatgcgccgctcgctgccgttattgccgcagaatacgtcgctacaccagccatacagcaggtcgttactgatcttgctctcggctcccatgtcgagatgcttttcgatcttacgcacgagcccgtcgctcatgtactttactttccgggtcacggggtctacaaaccgctctttcacaccgaaaagcgcatcggcctcgttggtcatgcggaaatccagcagggcttgttcgcgcatatcgaggatgccgaaattcacgtccttttccgaaagtttctgatagaggccctcgcttacggtcgtcatgtgaatctgacagtagttgctatccgagtagggcatctggctggggtcttccgacataccggcgttctcgtgctttgcaacgccgagccgatagatcggagtatcgacgggcagcgcgggcaataccgctgcgttgatcgggtagatcgtgattttgtcctgcgcgattgaatccgtggcgacgatgtggcagatcagcggattgagcgagaaaccgcccgatgcaaccggagtggcgacctttgtggcattgtccacgttcatcgtggggaacaagacattgccgtcctgcgaaaagatgtgcgcgttgattacgttgatttgctttgccccgctctcgcttccggcggtcacggtgtaggctgtttttactttgctttgcacgcctcggccccggacgctgtaatactgatattcgaacgaactgcacgggacgttttcgagttcccgcaacagcgtgtccatcgggaacagcgagggattgatctttgtgatcttctttgaaattgtcgggcggttgatgtcctgatcgtccaccgttccgtcagctttcgccggcttagtcgtggtgacggtaccgcgcatggtttcaccggcggtcgctgctgctccgctcacggccatcagcgtcgtgccgaggtcgtcgggagagaagaacgcgagcaattcacgaaacaggtaaacagaaacgacgcatccgcagatcgccagaacgccgtacaggaatttgttaattttcataatagtttggattttggttagaacttacgtttgttacggcgctcaattacctcgtcgaacatatctttgggggtttctgctttttcggatgtttcgacgcttccgccgtcggcaggcaggccgtccgtcttgcgggcctgcttgcgcttagcctcgatctgctcgttgcgaccttccaccttgcctgtttcgagcgcgtcggccacggctgcgtcatatacccaaccttgatagagtttggtaaggattcccttattcaccttgccgtcgagcaggtttgcgagaatctcgttatcgacccattcgacgaactgtttttgttcgtcctcgtcgagcccatgttcggcgaagaacgcatctacgtcggttttgctttgggcaatgttcttgtcgcgggcttcggtgcgggctttcatgtccgcgaggcgctggctgcgctcggttgctgcctttttgtatgcgtcataatcgggttcaccctctggaacggccaattccgacggatcgaactgtcgggcaatagcaacctgcaccggtacaccgttcgccacgtcttcgatgatctgcgcgaactcggggtatgcctgtactacctccatgatcgttttgttggccgcctcgtgtccggcgattttcttgtcgctctctgcgagatagtcgtaaagggtgttttcgtagtcatcctcgtcggcgaactgccggtcggggaattttgcagtcatatactcccgaacacgcgatacgcggggagcttccgcctgctgctggttggtgttttcctcttgcattttttcacattgattttgtgtgtgatagattccgatgtaaaagtatcttatttgttaattttcaagatgttataattattagtaaacttgcgatagtcgcacaaaatgtatcactatgagcaggaaaacgagggtgcgggacgaggtgcccgagaagattttaaagaggcacaatgagatacgccgccgctatgaagaaatgcttgcgcgggaacgcgccgagaatcccgaacggctgaaatacttatcaaagacttattttgtagaaatgctctgcaaagaccctgtaatcggattgagcccgaactatgtacggcgtattatcaatgggcgaatttgatataccgtcgctgcttacccagaacgaggagcataagtcccgtttgtttgcgccctacaatccgcttacaggtgagggatcacccatcgaacgtgtccggctttatttctcgccggaatcctatgtactgataccgacatacatggcccagaccccgacggttgctgcaatcatcgacgccgggggtgtcgaacaatacgccgcacgcgagggcattgctgccaaggtcatgtgtggcgtcgtgcatcggctccgggctgtgtatgattttgagttttggtgtatctcctgtgttaaaatcttcgacaagaccacgggccgcctcgtcccgttcaaactccgccgggcccaactcaagctggcgcatattctccttactgatttattcgcggggaagcctgtccgggtcgtgctggttaaggcgcgacaatggggaggttccaccgttacgcagatgcttatggcgtgggtgcagatattccaccgttcgggctggaatagcgtaatcgtgtctgatgtggaagaacaatcccgaacgattcgctctatgtactcgcgcatggccctgcggcatccggtagaaatatgcccggtacggttttgcaattttgagggttcgagcaagaataaaatgctggtagatcgggattgtgtcgtttcgataggctccatgcagaagcccgacagtttgcgagcaggggatataaaaatggcccatctttcagaggtgggcctatggaagcggacaaaagagaaaagtcccgaggatgtgatacagactatcctcgggtcggtgccacgggaaccgtttaccgtcgtggttttggaatcgacggcaaagggcatcggtaatttctttcacgatacatggtgcgatgcggtagacgggaaatcggcctatactccgctattcgtaccgtggtttgaaattgacatttactataaaccgttcatcaacgagaagcagaagatcgagtttatacagtccatgacgcgcgacgaactaacccgattctatgcgggggccacgttggagggacttaactggtatcgagagaagcgacgcgagtattcgaccgattggcagatgtgcagcgagtttccctcaaccgccgatgaagcgttccaaactaccggacgcccggcgcatgacccgctgtatgtccgccagcagcggccctttgtccgggaaccgctgtatgtcggagaactgctcgccgatgcgacctacgggcccgaagctctgcaaaatatacattttgcgccaacggccaccggagattttcacctttggaagctgcccgatacctcgcggcgtatcgccaaccgctatgcggtggcactcgacattggcgggcgcagtcccaatgctgactggagtgttatttcggtgctcgaccgtatcgccatgatggacgggggcgtggaagaatgtatcgctacgtaccggttccatctcgaccaagacctgaccgtatggcgggctgtgcaggtcgcggagtggtattgtcatgcgctgctggccgtcgaagcgaatagcctcaaccctaaagggcaagagggcgaccatacgctgacaatcctcgacacgatcaaagagcattacgataacctgttctcgcggtcagaccctacgcgcatccgagagggtcagccggtgaaatacgggtttcacaccaacgcggccagcaagaccgatcttgtaacccaaatgacgaaacggctacgcgaaattctttacattgagcgagataaacgggcgttggatgaaattggctggtacgagctcaagcccgatggcagctatggtgccgtcgatgggaagcatgacgatatttatatgagccggggcattgtactcaaagtttcacaacttatggatttacccgtggagattcggcagagtatcaagccaccgcccggtaatgtcatattgtcggaagcatccatgtaaaaaccccgacagactgactgccggggtttccgttgtggggctatggttttctattcttgtttcagccggtcaatctcggcttgtaatttatttatatattcgggatattttttgaatgtaaataaccgaatatttctgattgttacggctttgctgcggagttgtagccacatgtcgaggatggcgagaaattgacggtagagtaaaccggcattgactgttgcccgcatttttatattttgtttgaatgcatgggcaaagacataagcacccgcatatttctcgtctgcatactcgctgggccgttctataaaatccatcgtgtcgaaaagagatgcggcatcactcggtgtattatgccacaattccaaatgttcgagtggaaatttatccgtgttcatggcatagatcggataagtttccgcccaccatatattacggcctaaaccctgtaaactactgctatcccatcgagtgaagcgatacattttcaggctgttttcaggggtgcccgtttgatcggtaagtacatatagccaaaaattatttttgccgtcaaacattatttggccgttgaaataacgtttttggttaaagaaaaaatagataatatgcgaggttacaggttttgcggattggaaagagctcctttggccgaatttatactcaacaatattacgggcgtttaatctaaagtcccaaacccagaaccctatctttcgggtgtagtcattctctaacgcccaattctcgttttcggtttcgcggctatactctttttcaatgcgccagtagccggacggcaagtagtcacacgaaacctcttcactctgtttttgtatgatatgtagtttcccatcaggtaaacgatcaaattgcagcttgcttaccgattccccatttccccaaataatttccaactgtttatcggttagtttggcaacgtagtagcgcctatctccgatctgtaaatatcttgtcttgcggtcgaatgaataggtttggatgctgttgtcgtattgcgtggctatttccacggtgttattctttgaaaataggtattcttcatgtccgcccagccaaatgtcggcatcttcccagaatccgtttctgtaagaactgagaatatgatatgtccatgctccggcgagcgtgccggtcataggtggccgctttagcctcataagccggtaggggtctgcggtcggcagaatattgtggatttgcatggcgagaggccatgttatcgttgtttgctgatctcttatctgaaatagtttttgtcgttcttctaaaccgattctcgccccgaaagcaagtacttgcagtcttgtttgggggaatttcgtttcgcttttttgaatgatttcaaagaggtattcccattgttcgtttgtagtcttgggcatagtcgttttatttatttggtagtaagaggttgcgtaatgtgtggattatttgctcgtcggtgttgtgtgtatatgctgcaccgcttttccccaaatagaggtttaaaattgtccgaccgagcttctgcgccatgctcaccgtgtattttgttccaccgttctgtactccgtcgtaatagcagatcaacgccgaggattgcgccaacagaacatcattacgccggataaattcggatttatagggtttttcgccgatggcatagtagtaactggcacaaagttttaccgatttgtaccgcgccttatacgttgcgctgccgctgttcccgtgtgtggcgaacggtacgatgcacgcgaggcgtagatctcggagctcctgttgtaacgacaacaccgcttcacccgccagcaggtcgaaaccgtcggccatgccggttaggtaggtgttgtaacctacgctgtgaaagtatctgatagcgtacctcaaccgctcgaataatacgtgttgaatctctgaaaggtcatagcccggtgctgatgctataagtttttctggccggaatcccgaaaaagcaacggtacgggctgtgtcaaacggataatctatttccataaaaggtgatctgatattcataccgaccatccaaccgaggcaaaaagcacaccaacggccagcggcggcatacgggagagtgaagaaaggcgggagccccaaatatatagtgtacggaaaaatcctcacctcgtcaagccaatgacattttttctggaggctcccgctttctggaatcaaaaaaacgggggataggttgacagtgatctatttgacaacgtaatgctgctatggtggatgatctcctatcccccggtatgcttgggccgggagcttgcgagtggcgctcccaatgttcccggccctgtcttgctgttatacgtggtttggtcgttaaggaaagtttcggttcatgattagcagtaccagatataatgcaaaacgtatttttcaaaaaagaacgggcaggcgagtgactatgaagaattttgaacaatagtgacgcctcattctgaaccaaaactcttggcctgcccgttggctgcgcggaagaattgcgcaactcgctggaaaacttaaaattatttattatgaaaagacccactttggaaagtggctggttaaaaaagcaaccccggacattgtttcgcctcatagatgccctgttacgccttagtacagggatgttttgccgtgggttgcttgtgggggttgtgatagtataagggcagtcccggtctgttgcggttgtgggcccggaactgttcgtttgcaagaaaggagtagccgattgcctaatatgcgccctaacgcataggccgactactccgtgcggcataattgggtagttaggatttaccttgccgcatgaaaaaacaggggcccccgaatcatggtgactatgaagatttgggaaaagtgacgcatcaacgtcagacggagtgcccctgtacgggttgttgttcgcaaaagagggggcagcttctatgctatgaaagacctcattcattaatttgttaccccttattgtacctgccccctttggtgaactattgcgaacgcttgggcccgttggtactccgcacgcctcaaccgcacccgaattggaacggatgcaagcaagagcataagaatatgtgtaggcccgaagcatattatagatagttacggatgaaatccagttggcacaatgcctcatattcggccaagatttgttttttggccgctgtattgttgcatgtcaatgttttgcgcagcctttctacgtcctcgggtgtgaatccgaaccggtcgatattctcttgtgtcagttcgagaggacgattttcgcgtagacattcttcgcaataactttccagaaaggtgttgatatgttcttgtaatacgggtattattgccttactcgctttgtcaatgtaaattctatcggtgtattcttcagcacgcttgctgtcgatcttgtccaagtgagaagcgaaataaataccgaaatagtcctcggggtgaatcgtatcgtatcgttcaaaaaattcctgtatggtgaatacgttgtttttcagatcgtcgtacccctcaatcttgtttgcattatcgtagtaacggagcaggtagcaattctttttcggaagccccgccatgagtgcataaaggtggtgcgcatcactctggattttcaatagaaaatttttcagtgaatttttacggatatgtttgtactcgatcatggtagggatttttgttttaaaaataggggcgcagggtgggagaagaaaatagtgacgcattcacacagattcttccctgcgccccttacctacggtcatgccgcagggtggtaacttgtctttttataggtattgggagatattttgagttttgaatattggtacggcagcaagcgccgtgcatgacagggccaccggaagaacataaagggtgtggttgcaggacagtcgaaaccggggcggggtgcaacggcctcggccgccccgtaaaaaaccatccccctctgcgaagcagaagaaccaacgatggatgaacccgcgcggtggtatatttcagacatgatgaaatccgccgacccgagcgggccgccggaacgtgatatgttctgctggatgttggtagaccgtgacataagtttggggtttggtagcattgacccggcccggaaaaaagaggacgcaggtactatcttcgaacgcccggcctcacatgcctacttgtcaaaaacagcccttgcgcccacggtataccatagtgatatggtaaaaccgaggaacacaagcctgcttctctgacaagtattcgaggtgtgagttcggcgttcagatcagcgggattgtccctaatatgtcacggcaaagccgtatttttgtgcgaatataacataactttttcggttttagttatgcaacccgcataaaaagggcgtgggcattgaatacttatactcgtcagaaggcctgcaacagcccatgttgaaatacaagcacaagaggcccacgccggtagcgtgtggtcgtccgcaacagattatccccgcgccgccggacgtgaaccggcgatccgtgggagcttctgtgcctttgcctcaacaatagaaaggttgcagttttctgacgaagcaaagtaacaatccgccctttcagcgaatcgttacccaaaagtagtataaaaattctatccgggcaacaacgcgcaggtattttttatctattgtggcgtccttttgttatcattcaatccaaacagcatactgaatgccctttgtatgtaccgtgatttgcataggcatagatcacgtacacggagggtactttgcaatattcgcgccgggcctaaaagcccattgcccgtatgtgtagaggggatatggacttatttgcctgaggtatggctgccttgttcggccagcctgcaactatctgcaaaatcagtcatgcggttataattttccacacaaatataaaaacaaaattgcaaaatagatcggtcggaaccgttgaaagacaatactttatacgaatatataatttaagtctatccacagactttaatagtgataaataaaaagtctaaatttctgtcctttgtaccatgattaagcgacatcgtaacgaaaaactgataagggctgcggggatgcgattgcgggaactgcgggaagcacgcggactgtcgcaggaaaaagtgctgtttgaaacaaacatacacctttcgaatatagaaaacggacggcaggatattaccatcgctacgctggtggaattgtgcagtacttacgacacctcgttagaggatttttttaagggaatgaaatatgctcgatctggaacgaaataatgaaattctacaaaagatcgccgcaaagttacggttattgcggcgaaaggctggcctattgcagaaaacagtatcggcggaaaccgggctgaatatgggccaccttgagggagcgcggaaaaatgttacccttaccacccttgagcggttgtgcgaatactataatataacgctcgacgaattttttaaagatatagacatttaaaaaggctatccgaccggatagccttttttatggtttgggattatggttccttgatttccggcaggtcaatttgttcgtttaccagtccgtctgggtttttgtctaaaaaattcttgggcgatactacgctacgacctatttccttttcggtttcttcgcgggcgataccggcgacgcgaccgccgcgtcgggcaactgtcttgtttttctggaacgtatcgggcttttcctgttgcgatatttccgtcgtgacacgctcgccgagcatggtaaagatcaattctaaatcgtccatgtgatcgcggaggttctgacttttcttcgtcagcccttttatatatcggtattccgaaggcgttacgccgaatgtcgcctttgaaatctccgccgtgaggatggcgtaatcgcgttgctccgtgatgccgcgttcctgccattcgtcggtgaggttctgccggatggctataccccgcaggcgtttgtctatccactctttcgggtagccttttgcctcgtatagttgtttcatgcgctcttgggccaactccggattttcgatctcctgcactcgttcgtaacccacttgggccagccattgtttgaacggctccgctttgggcgacgatatggattgaatgatacgaaataacccttttacggttgctgcctgcacttttctgtgccgcccgtcctttgccgtcatttcaacaggggtacaaattgtaccccacttgctgttaagcaagggatcacgcgcccgcatacgctttacatattgctttgcatcggtgctgtcagtcagaaattcgactacatcgacgatggaaaaataccattcgtcgttgtggaatatccggcggatttctttgtcttgaaatacgatgatctgcgaggtttccatatctattacgctttattacacaaaggtagcataaattgataaatccgtatcactctattaagacgcatagtatatttcattctttctcaatgcaataattattctgcgttcatatattgttgcatcatagccattgcttttgggtcggcgttctgctgggctgcctgttgtagcatttgtagtcggtcggggtcgatctgcccggcggcggcctgttcgctgaatgtttttaactcggcttgtatcttctccgctcccggaatagaacagttatttaggaatatttcgagggggatgcgcccgctctccaatagcttcatcagtagatcgtccgtcagttgccggaacaccggcgtatcggtcgatttggatgtcgtcaggttgaaatccacgatcttccgggccatttcgggctcgtagtatttcgccagttcgctgactgatttaccgttaatatccacatagcggcgtgtcgtgtaaaactgcatcagcaccttgagtaacttttcgtcgcgctcttcgcagaacatattgtagttctcaaagagcaccacgaaattctgcgcggagtactgcgcctgttgtgcatagaggcttgacggagtgttagcgtgaggtgcttgcccctgtatcgctccgtttagaccgctgatctgctgcatgatcgtcatttcggtattgaacagttcccacgcgccaatattcgtgctgttcgtggcgatctgcttcggcagcttatccccggcaccctttttcagtaggacaacgccgtttacctttacatattcgcgggcaaaatccttgatgtccatgtcgtcgggaatacattcctgcggcaccataagcaggccctttgccgacgagccgattatgaaatccagcagggtcagtagacggttgatgtatcgttgaatatcgacaatatccgacatgacggctttaaactggccgtcgatgatcggcatggccgcgaggacgtaaggatgttcctcatgcgtgtagggcgtttccatttctttgatacagtgcccattcggggtaaggtatttcacacgccagtagtattcgtattgctcctgcgcatagaccagcttcaccgcttcgggagcgagccctaccgccgtgccctgttcgagccgttgattgttgatcgcttcgacctcttgcatggtaaggtcggtgtagacttcctcggtgccgtctgcgtagtcgtggacgtaaagcacccagcgtccgacccgttcccagacctcaattacccgatatttcccgagatcgttgcagaaaaggaaatttaggttttggagccgttcggcggtttgcaagtagatgctttccagctttgcggggtcgtggcaaacgccgtaaatctcgcgtaatgcctgcacgtcctcgcggtttattgcgaaattgcgtaccagatcgtcgaatgtatagtcgtggatctcgccgatgcgtcggatgtcggttagccgggggtcttcgatgtctttattgaagaaaaggcggttgatgttcacgaggtcgatttttccgtcggtgcggttcttggtactccaataatcgaagcgcacttttgcgcaagccaaccccgtgagacataattcctcaacaacattgatgtcgagttttcgtactttgtttagctggtgacacgactgcaaagcattcgtaagcatttcgcccagcggttgatcgtctttgcttcgggcatatacgacggtctgtgtcggggatgaaagaagctgcccgtggatgtttcggatgtactgctgcaaatagttgtgtttgagcggaattttgccgctgcgggaaataagggcatcttcgcgtatcatcttgccggggttctccgggtcgggcaccttgtcgcaccattggtcgccgttcttgtagcgtaggttccgggcgtgctctttgcgcaggtagagcatagcatcccaatcttgcgcacaacgccacaacagcgaaaggttttcgttcgaataccgcagtccgctgcgctcctgctcgcggtgtgtctgcgcgatgcctttgctggcttgggccaatagcttcagcttcttggtgtcaatattctgtaacattttcgtcctcgttgagagattttaccatcgtttcgttcagttcttcccgtagccggtcgtattccggtgtgttggggcgggtgtcagataggattttccgtagcttgttcacggcggtttggtgggctttaaaaatcgtaatccgttgcaggttccgctgcacctcggggtcttggcggtcgagcgctgggccgagccgtttgtactttgccgcaatgttggttaaacggtctttgaggttgtaatagctgcctgctgggttctcgggccgggcggtgccgtaaaaccggttgagtatcggcagatcacggctactgatttcctcgccgggggtcagtatggcctgtgtcgtatgtaccatgtctttggcaaacttccccataccgccgccgtagtaggttaagacgtgttcaacgtggctggggttccattcgaagataccccgcaataacgggtctatctcgccattcttgcgctggccagccggtgtattctcgtcgccacctcctaatcggttgatgcctcggcagagatagtatatggccttattcacgtttttaaggcccatttcagatagtgggtagttgttggttgtgccataggagcgacgccccaccggataaccgaaagcatcctcaccggcataccagatgtcataccacggagttagggccgtaggtatcagcacgcgggttgcatctcctttgggggacggtgaagccacgggggagaaatcctcgtacagcagcgtcagcattgtccgggcagcatcttcggccctaactttgccccggtagaggtcatgcagcagcgagcctataccataaaatgcccggaacccttgcggaagtggaatttttaaaaaaccgttctttcccatgtacgggattataaggtggttccgcttctcgtattccgaaacgaccagatcgcggccatcgtcgccggaacccgccaaaaagaaatcgagtagcaggctgtcgaggaacccggcagcggccaatgaagcaacgactttcgcaaatcgcttacggtttttgaacgctacgcgggcaatctgggcggctccttgtactgatgcgttgaaaaagacgtagaacatacccagcggacgtgttgccgttccgcgccggttaaaattcaccgttacgttcttcgcttcgtcaatagctaccagcagcgatttgccctgatcgagtgacgcgaggaatgtagcgaaacgcgaggtgttctcggcgactttcgacgcattttccaatcccgtagctatcgctttcgcaccgcttttctgcgctgcataggagagccagatgccggggcgctcgctgggctgcgctgcttttgcgagctccgcaacgcggcccgtgcggaacgctacataacgcttgatctccttttcagcctcggctacatctttactatgcacaaaacctgtttctccaccattatcccggaaatattcgtagagtgcatccatcacacgctcgggcccgtattgctcgatcaacattttgcggtcggcggtattgagtatgtcgagccgcccgagctctgccaccttcagcggtgcggatttaccgcgcacgttccgcgtgatcgtcgccatgctcgggggaatgttgcgcatgaatccgcgcaggtcgccgccggggtcgatgccatgtatcagcgcggcgtgttgcacgtcacgcagaaagttcgctgctacaaatgccggatttcgggatgtgaacgcttgggccagccagcgtgtcgcgttgcccacggtgtcgtccagccattttgggatagtcagtcggttgtactgattgatggcattggccacggctggatcggcgaatgttaccatgtaccgaatcccgtttacgaaacactctatattgcgttgtcgctcgatggattggcccatgtgcccctcgttctcaaaacggctgtcggcctctgccggtcgcacgatgtttaggcgttcggtttcgtcgatgcggttttcgaggtaaacggccaattcgtcgtcatgggcatttaacgccgcatccagttcctttttcagccgtgcgatttctttgcgtgcagcctgcgatatttctatatcctcaacggacgggttaatagtcgttgttacccagcggttcccaagcccctttgccaaccagaccttatctacgcgaaacagatcatccgagccccggctattgttctgtgccaaacgcagagccgcctgccgtgcccggttggtcttggccgcgatgatagccccaatgccgatgtttaccatttgggccacggggtttcggggcttattcgtgcggccctcggcttcatgtagtacttgccgtagcggtcgcgggccacggatttcgtccataaagtcgtatatttcggttgcgtcgaacgcttgcgggttcccctcgctgtcctcaaagttgtagtcgtaatcgcataagggtacataatatgcccagccgtggccctttatcaactttcggtgttcaggagcgagcatcccatcctcaacgagaatgtcgagtacccgatcattggccgcattgatcgcctgccatagctgttgtgtctgttcgtctccggcccgacggcgaaagtcggcaaccagcttgcgggcatacttatcattccacggatcgcgctgatcttcggagagcgccgcgatgcccgaggcatggcgttcgagtgacgattcggctgtgatatagtcaatgatattatcctcggtcattccggtctgcttggagatacccacaatacaatccaatatggggtctaaatactctttcgtgtacttgtctatcgcggtctttgtgacgcttgataagtggtttaagtgcttgtgtaggtctgtcagatcgtcgatctggccgccgcgctgctttatcacctcttgtagttgctgcacgggcagcgtgctgtctatgagccgggtgtattgacggtttttccaactttgtttgtcgtaaatcaccgtaggttcgatattgccgctgggggccatttcgggttgtttgcgcttctgtttgagtagttcctcaacaaattctccggcatacttgaaattctccggcagcgggcgttcgctggccatcgtccgccgccgtaaggggctgcggtacttatccgacatgacaaattgcaggtgtcggctcatggtgcgcataatctcctgcttggtcgctgacgggagtgtagctaccagttcgtcgatcacccgccggtaactgtctttgtcggtcaatttttgcagatcaaatagtgcgaggtatttgcgcatggatttgagccggtcggggcccatgtggtcgatgatcgttcggcccatgtcgtcgattagggcataggctcgtaatgcgaaatcgttcgcaacgtgttcgttctcgaataatgttccgataatgtgtcgttccttaacatattgctcaacggcatatcgttcgatattctccgggatggcatcgtcgaagatcacgcggtaacgggtgtcgccgggaacgctgtaaagctgctgccggatgcggtgtgcggtggcagcttcggttacggctgcgcctgcggtcttggccgtcatacgacggtgcttcgacaaccatagcatataggcgatgtcccggtcgctgatgcgcagcggcaacctcaacgcctcgcggagcatggagcgtatgcgcccaatgatgcgggcaaagcggctcggggtgatgttcccttcggccagccgcgcaagatattcttctgtggcgagccgccgggcctcaacagccgtcagtttgccggaacgttgtttttgctcttgggccatcatgtcggccacggcccgaacgccggtttcatccagcgacttatgaacgttatcgaggaatagcccgaaccgttcacccagcagggaacgcagccccatgtggccgacgatctcgtgtaatacggtcgcctcggcatccgctcgggtcgtaatattcggcatgacaataaccacccggcctgtggtcgggtcgtagtagcctttggcccgacgtttcctccgcagggccagcgggtcgttgtccgtgatgtgtgtaaggtcggcgacgatctcaaccggtgtgttgagcttttttgcaagacgggttgccgcgtgcgctatggtgttgtcactcgcgggacgttcggggtcaaaccaactactgccatcccggaaccggatgctgtcgcctgcggcatcgtcgagcagttcatccgggtcaatgtctatcgcttcttcgtccgtatcggccttttgttgggcttcgatctcagccagttctgcggccatctgtgcctctaattccgctatccgggcctctgttgcttccagttctgcctgtttcggaaaagccccgctaacctgcgcttgcagccgttcatagtcctgctttgctgtttccaatccaagttggcgggattctatttcctgtatgtaccacttgccagaaatagtataggcaacctgctctaaaacattcgatattttggctccggcatcgccttttatttcaggtgcttcctcgcatacataggatatgccgcggaatatccgaacatctttttcatttgataaagcccacgtttttttaagtcctatctttatatcaaatgtctttccgttgatacggattgtagtttttagctctgcgtgatcgcgttcgggcgttttccgtagtgcatcggcttcggcctcgatgcgcttgtttagtggggcaaagagtttttcataatcgccattttcggctttctgtgagccatattctactgatacgattgtattgtccggaaatatcttccgaaattcgttcccttgcttttcaagtgttgctataacgcccggtgtcgtgtcaagtatattttgcagccatttgaggttgcgggtaacgtatgcctgatgctggtagtggtagtcgcgggcatttctcaacttgcgcaggttgttctgtgcaagcgacaacgcaagtgccgcttggctgccggataatgacgccatcatctgtccgaaattcgtgctgtcgctactctcggcgtcgggttcctccagcgtgcgggatgatatatcgcctttcatcacctgtcggataaacgcctctttgatcttcaagcgttgatagccggttacatcaagcgtttgttttacgcccagccgcagaatacgcaccggtaaatccattttcagatgggaattaccctgccggatgatacgaccaacccgctgcatatagtccattggacggataggcacgtcgagatttacgagaaggtgcaaacgctcctgcatattaactccgataccgagtttttcagtagtacccattactattcgaacgtcgccattgttcacgcgccggaaaagtcgcgctttctgttcgtctgtgttgtagtcgtggataatagcgatctgttcggcagtaatacctgcagcaatgaatttccgctttatgtcctcaaagacattgaaccgccggtcgcggctttggtaagaatcgcagaagatagctgcggtacccttatagtggtcggtggatttcagatcggcgagaatctcccgcacggcattattaaccttgctgcccggttcatccggaagatcgggatttatcagccgaacgtcaatagctgcacgctttgccagcccgaacatcaccaacgggatatggctgttttcccgcttctgtttcgcgggcatagcgtcgaaacgttcaagcgtatcccggatgctgcgcatgactttccgcagggccggggtttgatcgagcattatatctgtcggcttacccccgtcgaggcgcggtgtgccaaccccctcgcgtaagctggatacatcctccgtcaatacgacatgcgcgatctgctgccagatcgccagtaattccggcatattcgaatagctggcgaaacgctgagcgaccttaaatttcccgtttgttccaaattccgcagattcttcgatactcccgaaattgcttgcaaaggcatcaaaagtgtctatgttgtattcctgtaatacgttttgcggcagcaggtagcgcatgaaagtccacatttccgccatcgtgttggaaatcggcgttccggtggcgaggacaacatttttcccgctattattttcaagaatataggttgatttcagccgtagactttgtgcccgctgggacgctgccgggtcgattcctttaatgttttgcaggtcggttgtaaaaccgagtttcttataggcatgtgcttcgtctaccaataacgcatcaatgcctaactgctcaaaggtcatggtttcatccgtgcgacggtcgagtagccgttgagcttgggcccgagcgttagattttaccttttcctcctcttttattgatttttcgctacctacttttttcttctccagcccctcaatttctttcttaatgccgtaggccagtcgtttcgcattgtcgggattgcttgcctcaacctctttcaactgctctaccttttcctcgatcaatccgtcgatatactgattgaccctaataggatcatcgggtatagcatccagataaccgtgatacaaaacgacaatatcccaatcgttgtaggcgattttggcgaaaagctgttgccgctgggatgccgtaaggtctttggcggagggtaccagcacgcgggccgcgggatataatgatttgatttcgtttacaaactgctcataggtcgaacgttgaacgacgatacagggcttatgagctattccgagccgccgcatttccattgccgtcgaaatgagcgtgatcgtttttccggtgccgacctcatgcgcaagtaaggtcgggccttgcaacccacgcataaccccgattttttgatgttcacggggtttcttcgtgtgcgcggcattggggaaatagtcgaatgtcgaaacgtcgatctgacgttcgacgatactgttaaatgccgtattgtatatttcagtcagtttgtcggtggtcgcctcgtcttgttgcttgcaccattgctcgaaagcctcatccagttccgtctgctttatggctgcctgcgccatagcttcggggtctttaactttcttttccttgttcgtaaggctgtcccactccttttttgataggtaggtttgggtcttgttcattcggtcaagcgcgagcctgctgccgggggcatccgctacacccatgctcgcatcgaccgtgttccctttgttggttattcgtgcaatatatttgttagccgcagttttggtgatcttcgcctcaacgttgaacttctcgtgaaaaaaacgttcgtatagctcggttggaacccatgtgctacccagcgaaatttttatctgcggtaacggaacgtccagcgggatgatcttcgacaatgcgcggatgttggcgttgaacaggccgttttcattggcctgttctgcctgtaataatttgtcgcggacattgccggataggtattcgctgcgttcctcaacaagacctgtaacggggttgatatatgcaagttcctgcgtaagcattgcatcttgtacgtcctcttgcgacttatggagtaattcggcgatgtagggcaggtcgaggcggccacggtgataaagcgaaagtgcgattgcatctttctcgttttcggcttttggctgacgtactggctcaatgaccctgcgagagaaaatatcagacttggttatggtaaatcttttcttttcacccggattattcgattcttcgacattttcaatagctgcgattgcgggatagtctacgtcgtcccgcagaaatgtaaggcttgtattctttgaaagtgtaccgtaccggtgggtgaatttggtgtaaagattattaagttctgcccgtaaccgttcgatattcggcaggtctttgttttctgcatcgagtaggtcgtatatggtctttttaagctccaaatactctttcaatactacggttttactacggccctttacgttctggcggttccaatccacagggattgcagacccgaattggactatatgcggtttgccgtcgatcagcgtaagggcaccctctttggtgccatctggggctatcatagtccgagtttgttccggaaccgagggggttacggaatacagatcagtcgggagtgacgcgatgaattgttttataacttggttttggtcgatagccacaaccggaatgcagcgctgctcggtgggacggatttctacaccactttcgaagccgaaccgcatctgcccggccatgaactcgggatgatcgaaataatatttgttgtaaaccatccgtgccgtggcatcttcgcttgtaaatcgacctttatcatttttgacgtacttaatatatggagcctcgcgctccaaaaccgtggtctgcatattcgccgcgtatgacgactgcccggcctcgtcccgtttacggatgatgatgatgtctgcggatgtttcagtacccgcagcttgtttgaatgtcgctgtattcagacgtacagccccgataaaatcggcgttgccgtcggcaacgacccagttacgcagagctgtgctgcggtcgagcgtgctggtggcggtgatgaacacccccagcccgcccggtttgagcttgcgtacacttttggcgatgaaatagtcgtgaatgtcgaacttggccgacaggtctttgtcgaacgtgtcgtgtactttgatcgccccgaacggcacgttcgtaacgatcaggtcgtaccgattattggggatgcgctgctgttcgaaaccctcaacccttacggttgcatccggatagagtgcccgcaggatgcgtccggaaatctcgtcgatttctacacccgcaaggttggattttgcactcaacgcagcaggcataagcccgaaaaagtgtccgatacctgccgacggttccagcacggagccaccggcgaatccaagccgctcgatcatgtcccagacggacgaaacgatctcgggcggtgtgtagaatgatgtagtcgtggatgctcgggccgcctcgtattcctcgggggttaataactcttgtagttcgttgaaataggaattaccccctttaaatacggatgataagccgccccagcccgtgaattgctccaatacggccttttcgtcggcagttgcttcgcgttcctcggcttcaagctgttttaccaatcggatagccgacaggttcgctttgatcttgctgacctcgccgtggggcgcgatgtcgcgcccgcgctctattacatggtttcggctattttttccagatcggcgacgatctcggccatctgttcctcgctgatcgtgattggctcgggttcctccggacagtagtccggtttcagacgttcccggaacagttcttcgactaactgcgggtcgctcccgttcgccagcgccgctttcttccaatccaacgctttgtctacggtttcctctatccacgttaccaactccctcggttcctcgcggtacatacgcagaagcatccccggcaggtattcggccatttcccaaagggctgtccgggcccattcggtctgtattgttcgcagggttttcatggttgtttggttttgtgccgtccgaggcatcgggagtagtgggttccggtgcgttcttacggcgaatatatgaatttaattcgtttttagcaagttcggccatttcaccgacggtaatatctgccggggcatagcggtttggagcatcgagcaggtatgattttgtggtcgtgcagacacggtataggatggggctaccggctcctaatatatcttcaattaccaaatcatcagtatagtcgctactggctatatatccagagggatgaacgggaatatttatgtatattccgtattcggaatccgccggcaagagcgtgatggagccgtcgccgcctgccggtgcgatattagtttcggcatataacgtcttaccttttttgtctgttttatgttcccagcccagcgcctttacgagttctttactgaactgcgtaaggtctttgcggaattttttctcgggccgcagattgccggtttcgtgtatgtctttctccgtggttccagtagtgtcatagcggcctgccagacggcgctgtgtgtcggcttcggggactatggccgggctcggtgctgctccctgtcctgccgcagattgcggcttgtcgaggctgtccagatcaaagtgcatcacgtcgctgtatgtgtccatttgcgcggtatattcttccatgcccggcatgtggagtgcgcctacataggtcggcttgaggtaaggccggatagcctcccccaaatcggcgagcatccgccgggcataatccgcgaatcttcgggccccggcctcaacatggaacgcagccatttgtgtaccgatagcgagtatttcggggtcgaatccggtgttaagctggccgagcttggcccgcatctgccgtttcaattcttcgtatcgctccgacgttaccagcttgttctgggctccgtactcggtcggcttttctgcggcattgtattctgtatcgctttttttctctgcacttaccgccgggacgaggtgtcctgcgttgttgccggtgtatgtttcgggggctgctggcatgtcatttagaggggccggtgttgcctgcatgtcggggcgcttctgctcggctcggaatgcttctgcatcctcagaggtgttgaatagaaaactacgggtgtaactgctataatagccgtcatgtgctttggccctttttttcagatcgtcgaatatagcccgctctacccggtcggccagttttacggagtagagttcggccccggttttggagtgtcgtgtatgttctgttggcttgaagatcgaactttgctccgtcgatgggctcgtagctttcatgctggcgctggcttgggcggcctgcattttctctaattccgcaaatatgctgtggcgggatgtgagtacttgtttcccggcatatttctcggcagcggcattgacctcggcaaccagcttgatagcagcggtagcgtctttctttgccagtcgccgaacatcccgcacgaatccggcttttatcagatcattatgtaagatgctgaaaaccttatccggaaaggtcttgattgcatgggtaaggtattggttatattctgttctgacagccggggtaaactctgcatcggtggactttggcccgacaggggcttgcggggctgcttggggcgtgtcattgaatgataggcgttgttgcgcacggtgggccgcaatcgcatcggcaatgatctttcctttcgacgcttctactttgaatatggtttcttgcaggttgtctatttcagcctgtaaaggttttaggatagtttcaacgacctgctgggagaaatcgcgcggaacgtcaaacaagttgccctctgccgtgttttgcggctgttcgaaaaggatagtttggttatcctcgttgtatgcgctcccgatagattgcttttctcttgtgtattgggcctgtttgcgtttgagtgccgcccggagttgctctacggtggcatcggtggatgcggcggcgtcctcggctacctttcgttcttcgtcggtaaggtcgccggatattgcgtccagtccgcgtccatgtcgaactgctcgcggttcgctttccggttgtccgaaatccgcatcatcacctgttcgggggtcactccgttcgcctcggccaacgtcgctactactttcgccatccgccgcaggcgcaggttgctcggttctttgcgaattgttgtcattggatgtagtctttggtgtttgttctgttgtcggggctggtttggcggccaacgcttcaaagttagcattttccgcaaaattatccgttccctcggtaaataaattgtcaatctcggcccattgttcgggtgtagtctgtccggcccattcgacaaatgcgctgtcgtatagtagttcatcctgcatttgcgccacccgtgcctcatgctcctgcatctgctcgtattcttcgcccgtcatgtcatcgtatgggtgcggctcgatctggtgtagctgtgctgcggccatgtaagcctgccggggtgagtgtatgcgcgaaaggacatccagaacggcatctttgatcgtcatgtcgtccatatcccagcggtagccgttcccctcgttgtttccggccccatactgaaaataaagcctctccgcatattggtcgggtgtcataccgtcgggggataggatgccgacgcgggagcgacgctcgctctcgctaccggagaaccccaactcgcgggcaagtccgcgccgttgaccgttatctttccatgcgaatttaaggccgctggctacgtcgcgcagtatcacgtcctcaatggataggtagtcgcccaactccgcagcgggtttcgcatacggggtcggggtttcacgcttgaatttcggaatatcgggccggggattccgggcgggaaccgcagcggcaggcccctcggcaacgggcgattgcgtggatctcggcatgcccttacttttgttttgcagccgttccaacgcagcggaataaatctgcacttggttcgcgtctgttgtgccgtcgatcatacgctgaatagcacgcggggcctcgtctttgcccacggcggcctgcatggtttctgcgagccgtgcagctacatcttcttggggtgtaacgtccgtaggcatgatgtcggcttgtccgctattcgtgtcattgttgccgaggggtatagctgcctcggtggggtctgtttcttgaatctggcttgcgggccctttgattgtgtggagcggtgccgaaacaaattgtccgtcgtccagttggagcacatagctactgccatgtttgccggtaatgcggccacgcacaccgtctgtcgttacaacctcgtcgccattcgtgtactgcggagcttcgggtgccacaacgcgcactacctcgtcggggtctatgcccgcttcggtgccgatctccatgtcctgtcgctgttgacgcttctggtgttccgctgcggcctgctgttcggagatttgtaactgttctgccgagaactccgcaacgggcgtgcttgcgaagctctcgaactccgcccggtcgatctgtgtcggcgtgcccgtttcggtatcgaggacgaataatgttccgtcggggccctcggtatcgaggttgccggaaagaacgacgtaggctttcccgtcggcgcgttgtccagtgatgatgtcctcggtgggacttttaccatcaacaccacggtaggcccatgcgttcgcagtttgcgctgtctgctggatttgtttgccttgtgtatccccgagctccatgccgtcgaggatttgccgctcgatgtgaaaccgggtatagtcagcagcgtgcgccgcgtcaatctggttgatgtttgccgcctgccaatcaatcgcggcgagcgcttgcgactgctcggccatcgtcggtttttgcatcgcttcgaatacttgcgcccgtaaggtttcattctcaatgcttgaaagcgcctttttctcttgcgttttcaaaacatggttcttgtgggcgtaggatgcgacgttcggcagttcgagggccgagaaccccgcacccatcagcgaggttgtgagaaatgttgtccagaggttctcgccggaaagattttctttccagcgttcatgctccccggtcagcagcggggacatgacacccccggcgacttcctctaaccactcgtctacggggccgttccaaagtgtacggtttcggaaatcggtaaggtacttgctgcgggtatatcccggcaggaagcggtcgagcgagagttttatacccaagcgtcgcccgatctgctccacgggccagcccagcacctttttcactccggctccgagctccccgccgatatgctctgtaaatacgtccgtgaatgaatctgcggcggccttatacatcaggttgtactgcggttcgaggtgttcgacaacctcgccgttgtccttaacctcgtactgtccctgcgcccgttcatggtagtttgagtaggtacccgcctgtaagggtgtcattacagccgcgctcgccgtgtattcgcccagcttgcgaagccctttccccaagagcgttttcgcttcctttttgagcagcattttgccgagggtgttggctccgctgctgccgatcttgctggtggccccgaagcccgccatataaggtaatgaggcggcaatgccgctgccgacctttgcgccggtcgttggcccgccccgttgggccgtgtattggtttatcagttccccataccggagaaggtctatcatgtcccgctccgtaggtgtgagatgttcgccttttgcggctttcttgagcgcccgtgtgatggcgatattctcgcctaactccccaaaccccattgtagcgaggtcgccgagggtgccccaatcgaacacctcacgggcaatgccggatgatttgtccccggcctgcttgtcctttacggttttctggtttaggagcttcaatgcccgctctgtcgcttgcattaggtaggtatcatctccgcccagtccggacggactacggagcgtgcttgatttggcttgagcgataaatgcctttttccatgccggtatatcagcttcgattgcctcgtcaaagggtgccagcatctttgtcctgttggcatcagcccgctgtcgggctcggtcatagatcgcccctaactgctgttgtaaactctctttaataagcccctcgtatacctcgttatccatatccggggtgcgctccgggagtgaaaacggctcaaatccggcgttatcgtcctgctgtaaggctgtctgcataaggtctgccggtgcaacgtccggcaggttgtctccagacggagcatctttgcgtttgcgggtctttcccagaccggagatcgcattaagctgttcgagttgttcaggtgtgagttcggggagtggcatagctattcgtaatccagatagtagttgataatttgttggtcgctgtaaccagcctcacgcatccgttcagcctgcggagtttccagcactttgcgcacatcattcgaaaccgggcccgcgatatagcgtttctcggggcggaacaggagccccagatcggcaggggcttgcggcttctgctttacgccgttcagcttgaggtagacggcacgtaatatctgggctttctgtgccggtttgagcttcccaaagacgaactgcggtaccttttcacccgtgtatgtcggttcttttgtcggggtgccatcttcgggaattatacccatttcgcggcctttctcgtatagcaggctttcttgtgccggattgagccttacgacggtctgttcgtcccgatcgaggaattgaacggcggatttatccgctgccgcagcagatcgggcgctggctgccgctgccgaagctgcggcccgcacttgggctgctttgatgttgttttcgcctcgtaatttttcgactttcattttatcgtccaaagtatcggctcgtttctctttttcctgctgggctttccagaggttgccgatcaatgtgtcgtattgcttttgggccaacgtgtaatcctgcccggcggcggtagcgtccatgttggcggcttgctgctcgccttgttgctggcccataagtgcccgcaggcgtaactgttggtattctcggttctggctgttgtagagtttatcccactcgtcgatctttccaagcatcttcatcggagcatcagtgccggtcttgggaatgtagccctcggtggccatgccgacaatacccgtacccagcgctgataagaaattcgaccacgccgtgatctttgccgccttttccgcgcgttttatccggtcggtgtcctgctggggcttcatcgtgtcgatgaaggccaaaatcgggttctggccgtcccggtacaggtcggtagctcgctggcgtttctgctcccatgtggcgcggcgttcgtcggcttctttttgtcgccgctgtatctcgtcagcaatcgagaataccggtgtggttggcttctcctgttccatactatttcccacctgcaaaatttgctaaaccgccgccggaaccgctgcccataccgtagagcatggctaactggccgagggagctcccgatgccgctaatcatattctgcgtgcctgcggccttgccaagttgcgcttgatagcgcgtccctgtaaggttgtccatgcgggcttgatagtcgcggcgcacttgatctttgtgctgttctccaagccccgcgatctgggcgagggtctgcgaatagtttttgttgagcttgttggcggcggcaacttttgcctcgtccgtagcgccgcttttcacggcgttggtgttcatggcctttagttcgtcctcgttgtagtcccggatgcgtttcagcatggcccgtgaatcagctcggtcgaggtaaggcatattcatttcggagttgtaccactccttgaggttccgctcgcggtcgctgagtatctgatcggccttacgttgctttttattggcagaaatgccgcctgcaatcgacgaagcgacggaaatggcggccaatgcgattaatggaaacatagtgtctaaattttatcactctgtaaaattagcgaccgcgtgtataagaattatccttatttttgatcggaatatatcaataaatcagctacttatgtcgcgcaaaacactcgacgacgatgaaaagaacgcagtctgtgtgagatacgtgcagacggggagtttacgcgccgttgctgccgagttcggaataagtgcgatgcgagtaaagcggttatgggatagcataggcagcgaccagcagcaggtaatacgggcatcggtcgaagaggttcggcaagaggttgaaacggtgatcgtgcaaagcgagctcaccggggactatctggaacgggtgatacaggcccgaaatgcggcaatcaacgagctctacaatcggctgaccaatattgtgcatcgcaacaaaatgacggataagaacctgatagcagcctgtaaaaccctgcacgacatcagcattggggccgagcagcctcagacggagcccggcagcctatttatggtgctgaatcaacgtattcataaggaaatcaataacaactactacttacaagatggaacgaatgaaacaaccagtcccggtgctgggaatcaatcgggcggaaaccgatctgacggttaaggacggaagctgcgaaacgctacacaacctgcgttatgacgcgggcgcttggcgcaatgtcgaagcgtttcggcgtatcggggctgtgacagattttcacggtttcgaactactctataagcatcccatgacggctgacgatctgtatatcgctattgacactaccggagccgttcacgaggtacgctatgcggatggagctttctcctcgacgcagacgatcatgcccgcagtttcgggcctttctaccgtcttttcgttcggacatgtacttgttattgtcacggataataaagagctttattttgtattgtatgggggcgaatatgtccgctttgagatgcccgatccaccggatataagcgaatcaaaggcggataaagttcgttttggagttgatttttattatcgtaggtattgggaaaaccatgatataaaagaagaatttgcagacggggacaacctcgcgcggcatccgaatatagccccggacggtggatattattatacgagaataaccgaccgtgtgaatcaaacgctacacctgcccatgtacaacggagaatactggcagggggctattgctctaatggtggcttataggatgatggacggaacggtcgttgctaactctgagttgatgatatttgcctctgacgccggagacgacggttggcaagaggattatggcgatgttgtggccgacgggatgcctaactacgtgccggaaaaatacagaacgggcattttctttggctgtaaggcaaaaatttcgccgggaagcaatacgttctacattgaaccgcaggtaacaatcaaaattcccgcaggaatagatacccgaatcgttcaaagtgtcgtaatatgctctactcgtatcgtcccaatttacgattttgaaaaaacgtggaaagataactggagcctgtcagatcgcggcggtggcggttattatcagacttatgattttagaaaattgttcacggaagatgttgatttaatgcaagaaccgttatataggatcaaagaaatagaaatccgggactttgtagacaatcgacattcggaatcattgtcttataatgacatgaaaaatgtcgaaagtatgcctgtctacgagcctacacaatcacaccatacgcaagtggggaaatgttactatgagtacaacggcaggctgcataaggcgaatttacgcacgcagctattccccggatattcgcgtttttgtttgggaaatgacggcgaggatgctgcgaattttgtaacgaaaatgatttgtacagtggatattgataacacccgaaagcaggtgtgccagtcaattcgaaatttcaaacctacaagaatccggcgtgtagtgtcataccccgattacagagccattaaatttgcggtttgtaccaacgatcccggctctatggcgcagctttggtggttggatgtgaaccttgaatcctgtaaggggaataactatgcctatgctattccatcgccgacctcacggtctaaatatccgtcgttctggatgcccgaaaccccgatagagcatgaaatctttgaaaaagaggacgatgtatatacagagcctaatcgggtacaggtgtcggcgttgaacaatttgttttcgcagccctttgcaaactcgtatcgtgttggactgaacgaagaaaccatatttgccattgcgaccgtcgtggatgaactgtcagccacccggtttggtgcgttcccgctgtatgtctttaccgaccggggcgtgtggtcgctggaaagcggcaccggcgaggtgctctattcgaacattctgccggtgaatcacgatcagatcgtaaacccgaatacttgtgcggcccttgaaacagtatattatatcacctcacggggcgttcatgccctgcggggacgttcttccgaggtgatctcccgcgaactggagcaataccccggcgaactggccgagtatcttacagaagcccgtatctattttcaattcaaatacggcgatctgatcgtctttaaccgtgcctattcttatgcttatgtatattccatagcagcaggcgtctgggcgacacgcgacatggccgggcgagtgctcaacaatgacgaggttgtgacggcccatgctctcgctacacttaccgacgagcagatgatcgagccggtcgaatgttgggccgtaacacgacctctgaaactcggtacaacggagtttaaacgtcttgaaaccgtcgtagcacgcattatgtcgcaggattgcttcgcccatattatcgtcgaggggtcgaacgactgtaacacatggagcgttctccgtgacgcatggtgtaacgttcagggcatggatgcgaggttgcgcaggacacctctatcatacaagtttttccggctgcgactgcatctgacagctaattgtcggatttcgaccaccagtgtcgatgtcgagttctacccgcgttttgtgggacggctccggtagagtgttacattatgttatattatgttctatttcgtcttattactactacatatatgtaagatgctattaaagtcttgttatatatgtttggttaaaataataatatttatattgtatatagcatataaaaacagtttttaggaaaggaggttgtgataaactgttggttgcccttaaaaaataataacactatcccatcatgaaaaaattattatttctcctaatgattattggtttttatgcatgttcagaggatttgactgataatgtgcttcctaatcaggataaagccgccaataaacaggaaattatgacacgctctgcgatgttagccaatgaatctgttgagcctactgtaaaacttgggaataaactggaaaatccttattctgtaaggaatatgaaagctgctgtaagggctcttaaagcaacaggtaatatagaaattgaggtgccagaatcatctattcatcccactcatttatacattgaattttcgccagaatcaaaggaacaacttgatattttaaaagcagatacgactattgaattttatagttatcctcttgattatgaactgataggcacgggcgtatttgacactgcgggggcccttgaagatacccaagtcgaatcgttatatgcctcgtggccatatggaaaaacactgccgtctaatgttccatattctatacttgaagaattgtatatcccagacgaaaatcttgatgacgaacctattacacgtcccggtatggtttcttctaattttattgaggctcttgtagataaatcacttgaattaactggaaatattgatacggaaccagaaactcgtgcaagtagatattatccacaaggatatattaaagcgtgggatgatatagcgcaggattatgttcctattggtggtgtaaaagttcgagcccgtcgttggtttaccactcgtgtaggatatacggatagaaatggacattatctgtgtcgcggcgatggttttgaacggcctgctaattattctatttgttgggaaagtaattattgggatattagagatggaagcattgtgcaagcattttacaatgggcccaaacagcgtggatattggaatttaaatatcggagggggtaaatctttgcgttatgcaacgctaacaagggcactttatcatcatttctttgggccctatctattcgataagattttgactttacggaaaattaaaatctgttatcgacataaaaaaggagatgaaagaggacattttaaaacccaagcattgagaggtattcaaccggatatagttatctatggagaagatgcaggtggttggcgtcccacatacggtattcttgaaactgcatttcatgaattgggccattgtgcttttttctatcgtgtcaatggaagaaatgcttataaaggctatgtagatacgatacgagaaagttggtctaatttgatcgggtgggcagtaacggaaaatgaatataccttacgtggatatgcccatgaagtgcataaatacgaaacatttttccagccgccaatgtatcacatgctttttgaagtgcctgatgagtataatttccaaagttggtcgaaatacagtataaatacggattatggcagagaatatacaccaatttttattgatatttatgacggctcaaatcaaagggtgtattatcaaaagtatagaccaaataccgatgcaatgatatatgtcaatgataatatttacttgaacgatattgataagttgcagcaggtattatataaatctaagaccatcccccaactcaaagaagcattgaaagaatacaaaggacaatatggaataacagataaatcattggacgatttatttgaattttatttataactttgaaacattaaaagccgtctatatgccagtgagtaaattatgtctattttattttttagtaatattctgtttgggctgttctgacaatagcagccgaaacgaaccacctgtatttgagtatgagtttaaaaatcaaagcggacataaattaacaatccagttaatagatgaatatggtaattttccgaatccgctgatattggagaatgaagaaagcttttcatggggaaattcaaaacacagacccggatttttcccgtttcaggcaaaggaactttgtatattagaatttgatgatattatccgaatctatgcaaatcaactaccggataatagaagcatttttattgaatatggatatcaatgttctgaggtttccgatggcttatcattggcagtctttgtgttcacaaaagaggattacgaatacgctctcgaacatgcaatagattaatgtaagacaacggctggcgttttgccagccgttgtctttttgttgtagttgattatcccgatttttgtccgttcgatccggaagctaacccatgttttcattttccacgggaaccgccccgggcgagggtgtcggcagtaggacgttgtacggcattgcatttggcccgctgactgtcccagaggcggaacagcagacagaccatagccgaaataagggcggcgatcacgcccgaaaccagaaaaacaagtgtttcattcatagctttgatttttttgtggttagaataatttttgtgttacgacagggggcgtataattacaccaaacgcactcctgtacgagcgtcccgctgccgtttacaacggtagaacgtaggttgtttcgttttctggggaaccgcaccatgtaccaatcgccgtataactcctgcatcagcgggcaatcataactgctcaccattgcgtaacctttaatcgagtggagccgcgccgccagcgcccggtgatcgtcgtccgtgaaatcgaaatggtagtcgttctgggagtttcgggatgccaacggatagggcgggtcgcaatagaagaacgcgcccggaaagtcgagccggtcgatacagtcgtcgtagctggtattggtgatctggaaatttttgcggatctcggcggctactgtatgcaactttccaattccgttattccaccggctaatcgtttctccgccttgagcgtttacgtgctgcttggtcatatgccagcctttcgattgtgcttgggcccctaatccgtagaacgattgccgggcccggacatagaagcgtcgcgcctgctcgatcttacccgaatttgtattgccccagctattcaaatattccagttccgagtggggcgtgagtgataatcgtcggataagttcttcttcatggtcgcgcagtatctcgaaaaagttggttatttccccgttgatctcattggctgtccgtataacccggccccgatagttcagcgatacacaaagggagccggcgaaaaggtcgatcaggtgcgtaaagtggggcggaaaattgtcgtagaggtattctaaccagacgaattttcctccgaaataattaaatgcgatcagtttatctttgttaccgctcatattttttcgttttcacggggtgcgttaatctccgaaatctcgtttacagttgcaataggttattcttggattggcccattgcccttgaaaccatttccacgcagggtcgaactgaccgctattatctctatatagcatggcaaagggcataaaccctgcccgccatgcttcgcccatccgtttatgggctttctccattgtgtcacctttgtagccgatcagtatgtagcagcgcagcgcgtgattggatttcgaaaatcctgcatcggtcagcatcttacctgcttcttgcaacggttccagatcgttcggtgtgtcgtaggcgaaaaatagcctttgggggtgtagttggtatagctgcgcggccatttgagaggtcataagggcggcttctaatccgcccgtgaatataggccgatgtggttgtctggccaacatggagaatacctcgtcaatgtgtcggggagagcaggccagtaaattatcatccgagacaatccagccgtccgtaacaggtagttcccgaagctggccgccctcacgtttgggaacagcgcagaaccagcaacggtttgggcagccgcgcgaggtgataacgtagcctttctttaggtacatgcccggtataaagtccccgcccggctcgttgagggctgggccgccgactttcaccggcgcaacgcaagcccattgtttcgctgcccattccgcccatttgaggtgccatgtaaaggcgaccgagatgtgcacctcgtcggcctcgtcaaagagagacggtattgcgttgatgcgcaccagatcgtcgtctggtgtagcatgggttcgggctgggaacacgcggataatacgtttcatatatcgttaaagtctattgttctctgaaacctcaacattccgaaaaactcctttgcggacgtgttcgatacccaccaattaaaaatctcatctgctgttgcttgataattattcatatagccattattgtcgattagatgttggatactgcgtttaattgctttttcaactccgggataacgcatgcgatctttggctttaatttttgttgatgccattggacagaatatgcagcctatacgatgatagccctcgtcataaagtcggcagtatggtaagccttgtccacgaattaaattccagacatcagcatccgaccagcggaaaatcggcgaaagcataattttgtctttgccgttcacacacgcgaagctgcgatcagatcgtcggttgaattggtcgaggctcccgctgaatttatgaccagatacctctaactcgttgcgtgctgcccggcgggtactttctgctgctcggatgcccaaaagtgtgacggttcctgctcctgcctgttcttttagataagcacaacagtaccgaacatgctgtaaagggagcatctgtttctttacgatcagatcgtaaaagttgatcgtcgggcggtgtaacaccacgtcgggatagttggcccgaacaaactgcatgagctccggcgggtcaatagttgttacctgcatgtgggctttgaatttgaccccggccatctttgcgaggtggtataataccatactatctttcccgccggagaatgctaaatgatagccgtctggggacatgcgtaaggccaacgcctcaccacgtcggagaagtgcgatggaatatgcgatcttatgttcgagtgcactcatttcgtttcttaaaggagccctgccacgaggacagggctggagtttttacttacccttttccacgacttttttaaagtgggggtaagggcggaattggggtacacgtttcggaggaatagagagttgttcccctcgtgtgatgtttcggcctactttggcttttcgctctttcggctgaaaaacaccgaagccacgcagaaaaatgcgctggccatcggccacgctactttgaatgattttcataaaatcttctacgaccgtaagcaccatctgggcgctcaaatctcgcttgtccgcgattaggtctactaactctttttttgtcattggcttgggttgttttttagttaatgatttatgtaagggcgtgacgcctttatttgtttcgatatagcgcaccggggagtggcatagtccgggcctgcggttctgccgacataaactatcccggctcgctccaactcgcgcatttcccactctatgatgaacacgggccatcctgtacgctgggatatttccaacgacagggctattgtcggatggcggcgtgccgctcgtttttcttcaacaattcggcatattgtgtcgtacagttctgtcatatcttctgctttcgttgcaatacaacatccatccgggcaaaactgttgaatgtggctattgcgctggtgtgggcggttaatacgttccggcgattcgctatgctctccataagccgctcgacatcgtgccagtcggttattctgtccgtgatgctgcggcagttgtcgagggtcaaaggccgttcaaattccaacatgatcggatagtggcgacgaacccagatatacattcgttcgtgcttggcgagttcgttccaactgcggttgaacatggcaagggccgcccggtcgttttcgatttggttttcccctttaacccctttccatttttcactatgtgtatgtaggtttgtttctgaattatcatctgctttattatcttctctttctctattgtcggagttaatagccgtttcttcggaattttccggtacagcttccgcattgttcggtggaaattgggtttgctgtgcatttcttcggatagtttcgtcagttttcgcccgtctttccgaattttcgggtattctttccgcatcttcggttatttcttccgaagaaatgagggataatgctgcatctataccgcctttacgccgcaaaacggtcataatgtcgaggtagcgggcctgtatgcctttggatgtcagtaagccttgttgcttgagtatttcgcggtcaaataggccgaggtctatgcagtcgttgtatataagtgtcgtgcgctcatcgtcgagcaggcaggtgtcggcgatgtcggcgatcagatcgtcgtccgcagtaacatagtaccctttgtcccggtagatttcacatagcagggcgaggtagacagccagcccgtcgttttgccatcgacgcatcagccgttttaatttccggtcttggaagatgtcgcagtccatccggaaatacactaaaccccgttttacgtttctgcctgccatgttattagcgcaattttcctttgttgtaaagttgctttacggtgtcgagttcgattcgggaataggttactttcgtattcccggcacccggttttatacgggttatccagccgcgatttaaccacgttcgcacgaggctctctccgtagacacggaacgcttcacgctgtgaaatttcgtccttaatcagccccaaacggttgagggcgatagaggcacccagcgcggcgctttccattatcaggttcttctgttcgaatagatcatccatagttttgtgtgttcacctgttcggcatcttcagctattcggagtagccattgatagtgtcgcaggatgtcgggcccaaattggcaagtgtcgatggcttgtccgtctttcgctattgttcgaattgcgtgtgacagatcgacaatcacccgaacgcgcggggtgatttcgtgtgtgattgtctgccagtcacagtcaatcttgatatgccattgagtttgcataagggcatgggggttattctccgagttcgaggctccggaacagttgttgaatttctttgcgagaaagacgagctccatcctgctggtgggcggtgcaaaggatgtagaaatgatcgccttttgaacgtgtgcggaatttcaaccccttacggcccatgcgcggtatagcgtgccgggcattggttaatgcttgtccctctaaagggaatcttttaatctccccgcagccaaatccccctaaaatatcactccatgttcgaggtaattcgccctgtttgatgtgctcgtagtccattttgtatatttgttttaggttgtgtgaaatatgtaaaaatcacatttttgcggtgactataaggtacaaaatgaaaagatagcatacaagcaatttaaaaaggtctcgacatatctaaaagactgacaatcaaataaaatgcgcctgctgctttttagggcaacaggcgaaaaaatgaattttaacaaagaggtttatcgggacgctataagtcgttgccccaatgtgctggatggattgttcggggcaattagggtaatctgctgggtctgaattgtgtttttaatgattgtattcactcgattgctgaaaatgcagtcgattacaagcctgttggcttgatcgacgacatcccaatcctcggtaatgtatatgtgagccagttttgatgcgctgcgcggagagtgcccgagcgcgaaatctataatatcatcccggataccgcagtagttccatgcaaaggatgcccatgttcgacggaaagtgtaggtttctaaatccttaaatccgatgatctttccgatccgtttaagccctatgttcgctgatcggttaaagttatttacactcttgtatagcctatgaaagttgaaaaggcgaaccccggtcggatcacggtatttttcgatcagcggcattacctctggctcaatacggatattgacccgtgcgttgtctgttcggcgatttttggtctttttcctattgtatataaggcgtccgttttgtattccctttgcttcgtataagtctacggtatttattccgatgagcaggaacgttaggatgcctacatcccggcctaaatcctgtaaattgcaatctcctttgcgtacaaatgacgtatcatctgggatggtaagtagttttctgaattgtgctaaactcaaaggctgtttgtctgttgtcgggatgggtggctttttcacctttgagaacggcgagagttgaatgcggataatccccaaatcttcatcgttatattcccttttagctgcattatgcagggcttgtaacgtcgaaaaatatagagagggtgcccgacggcctttcttatggccggggcgcggtggttcttgaataagaaaatctataaatctgccgacgaatttagacgtgatttcccgaatgtctaaattatcccggccaatgaagcgccggagcgcacttaacgccgttccgtacatagtggcgttttgtatgcgccccgttgccttgagccgctctatgtgtaattggccataagcaaagaaatccaatttgaaattttcctcgtctttgaaattctggattaattcgacgatttgcccgacatccatcgtgtcgatcttatcggcgtatttgttgcagacctttctatacttatcaattataggacgggtatcatcaacatacgaggttccccgtttgaaatcgaatttgtcgtttacttctgctgcgctggcgtagtagggggtcggcagataccgcgattgtttattgtgagtgattcgaattttcactctgaacgtcccgtctgctcttttgtacgggggatgaataacggttttaaaagtcggcataaggcaagaaatttttataaaactattagaaaacttcttacagcaaatgtacctttcaactgctgattatgcaacaaaaaaacagcgtccgaacataattcgaacgctgttaattagttaaaaatcagtgcaaatgaatgatttgcgtattttttgccgtttggcctctttttgcgattagcaaaccggtggtttcagccactcacccacctctccggacacgccttccggctgttaactccgaaagggtgtgcaaatatagaatctttttagggaaatacaaagaaatgcggtcaaaatttgtatttttgcgtaaatcctcgaccccggtttgaaacgcacccgttgcatattacatatggtgtgctgcttttgtcgcggtatccgccgcagcgcagcctgcgccggaaaaccgcctcgtgcggccgctcgccgaggtgctgcccgaagctgcgccgtgcgctttcccgggcggactgcccccggcggctctcccaagctgtgcacgaccggaacgaatcatcgaaaactggaatagccatgaaacggattctcttgcttttgctggccctcggggccgtttgcagcctgaatgccaaaacccggaaatgcctctaccgtgtgacggtcacgggcaagcgcgccgaatgtccggtcgtgatccgcgatgtgcccgagtgggcgcagagcgccgtcgtgtcgctcggcggcgttcaccggattccctcccagttggaccgggaactgggcgaactggtcttcgtctccggcatttccggcagccagaatttccaggttctctactcctcggaccccgacaagcgcgttttcaaaaaacgcgtacatgcccagatgtggctcaagaaccccgacaagaccctgcgagccgtcggctgcgcctcctcggagaagaacgacatgtaccataaactgcaccaccacggcccggccttcgagtcggagtacgccgcctaccgcatctatttcgacaacaagcagaccgtcgacacctacggcaagaagcgtccgcagctcgagctggccgagacgatgtggtatccttcggacgagcagctctcccgcggctacggccacgacaacctgcgcgtcttcgggtcggtgggcgtggggacgctcaagggctgggacgccgaaaagagaaagatggtccacatcaccgatttcaaacgccgcgaagcgcgcattctggccgacggacccatccgcacggtggtcgaaatgcgggtcgaagggtggcgctacggagggcgcgagatcacgatgacctcgcgctacattctttacgccgggcacggcgacgtgcaggtcgaaaaccgcatcgagggcgacttcaggggactggtcttcacgactggcgtgatgaagatggccgaaagcgaggtctgtaagaacgataacgtgatcgccgccttcgggcgcgacttccccgaaaacgacaccgtgaagtgggagcgcgagagcgtcgggctggccgtcgccgtgccgcagaggcagatcgtctcgcagaccgacgacaagaccagctacctcttccagctcacgcccgatgcccgcggacggatcgactacgcgttcgagatgatctggcgcaagagcgaatggctcaaggaccgcagcgataccgaatgcgtcctgggactgatggagtcggtgggtgcggcccggaccccggtcgtcgtttcgcggatcagacagttttgagaaaaagtgcatcgtttgcgtcaaaaaatccctgtccgataagcgggggcagtgtacttttgtatacctgaaattgcgaaaattttacgtatacgaataaaaccacctctcttatgaacttcagacaagtgacgatttgcgcagccgcggcgctcctggcagccgccgcaggatgccgcgcacacgccccggcctgcaaccttccgttcgagatgccgcaggtcgcccggcccgcgattccttcgaatacggtcagcgtcgccgatttcggcggctcgggcgacggcgacgcgggaaccggctatgcgatgaccctctcggtcacggcgggtgtgctctcgcccaacatcacgggcctgccgaccagctgggctgccggcgacagtacgtggacggcgaccgacgataccggggccgccaggtagccggaaggcttcgcatgaaagaggcgcggaacgttccgcgcctcttttttgccgtttgaccgttgcggaaccggatttgcaggggagatggtaaaaatgtaaatggaattttgtatctttgcatgatatttcgcttgtaatggcagaaaacgagaaaaacatactggagaatatcggagagcaggaatacaagtacggcttcacgacggacatcgaaaccgaaaccatcggcaagggtctttcggaggaggtcgtgcggctgatctccgccaaaaagggcgagccggagtggatgaccgagcggcgcgtggcggcctaccgccattggctgacgctggagcctccgacctgggcccacctgacgatccccccgatcgactttcaggacattatctactacgcggctcccaagcccaaaaagcagctcggttcgatggacgaggtcgaccccgagctgaagcgcacgttcgacaaactgggtatcccgctcgaagagcagatggctcttgcgggcgtcgcggtcgacgccgtgatggactccgtgtcggtcaagaccactttcagggaggtgctggccgagaagggcatcctcttctgttcgatctccgaggcgctgcgcgactttcccgagctggtgaaaaaatacctcgggagcgtcgtgccctataccgacaacttctacgctgcgctgaacgccgcggtcttctccgacggctcgttctgctacatccccaagggggtgcgctgcccgatggagctgtcgacctatttccgcatcaacgccgctggcacggggcagttcgaacgcacgctgatcgtggccgacgagggcgcctacgtgagctacctcgaagggtgcaccgcgccgcagcgcgacgagaaccagctgcacgccgccgtggtcgagatcgtggtcgagcgggacgccgaggtgaagtattccaccgttcagaactggtatcccggcgacaagcagggccggggcggcatttataacttcgtcaccaagcgcggcatctgccgcgagaacgcccggctgtcgtggacgcaggtcgagacgggttcggcgatcacgtggaaatatccgagctgcatcctcgcgggcgacaactccgtcggggagttctactcggtggccatgaccaacaatttccagcaggccgacacgggtacgaagatgatccacatcggccgcaacacccgcagccgcatcgtctcgaagggcatttcggcgggccggagcgagaactcctaccgcggcatggtccgcgtggcgaagggggcggagaacgcccgcaactactcgcagtgcgattcgctgctgatcggcgacaagtgcggggcgcataccttcccggtgatcgacgtgcgtaacccgacgggtgtggtggaacacgaggccacgacctcgaaaatctccgacgaccagctgttctactgcaaccagcgcggactctcgacggaagacgccgtggggctgatcgtcaacggctatgcccgcgaggtgctggccaaactgccgatggagtttgcggtagaagcccagaaactgctggctctccagttggaaggcagcgtagggtagtttgctgtttgcgtctgcaatccggtcgcatgcgataagcccctcccgagggaggggtttagggtggggtcaggcttgcaaacacggcggaacgccgtggaaacgacctgcgagagcgaaaaaaggaaacgagaataatagtaagttgatgatatgttaaaggtaaaaaatctgcacgcctcggtcgacggcaaggagattctccggggcatcgacctcgaagtcagggccggtgaggtgcatgccatcatggggcctaacggctcgggcaagtcgacgctggcgtcggtgctggcgggcaatgagaaattcaccgtcaccgaagggtcggccgagtttctgggccgcgacctgctgtcgatgcccatcgaggaccgggcgcggctggggctgttcctgggcttccagtatccggtggagatcccgggcgtcacgatggctaattttatgaagctggccgtcaacgagcagcgcaagttccgcggcgaggagccgctttcggccgccgaattcctgaaactcatgcgcgagaagagcgccgtggtggaactctcgtcgaaactcacctcgcgggccgtgaacgaaggcttctcgggcggcgagaagaagaagaacgagattttccagatggcgatgctcgatccgaagctggcgatcctggacgagaccgactcggggctcgacatcgacgccctgcgcatcgtcgccacgggcgtcaccaaactccaccgggcggacaacgccacggtggtcatcacccactaccagcgtctgctggattacatcgtgcccgatgtggtgcatgtgctctacaagggccgcatcatccattcgggcgacaagtcgctggccctcaagctcgaaaaagaggggtacgactggctgatcaacgaatacgacaagtgatggagacgattcccgacatcatccgcgggttccgcgcggcggacggcgaggtgctccgcatcgccggggccgaggccgaaccctttgcggcggtcgatccccggcatctgcgcgtggaggccgcggcgggcgcttcggcgcggatcgtcgtgctgcataccgcacccgacgtgtcgtcgctgacgctgacgctggccgaaggggcgcagctggagctgaccgaactgttcacggccgaggcgttcgccgaggtctcggtgaagcaggccgcccgcagccgctgccgcctgacgacggcgctgctgtcgagcgccaacgcttcgtaccgcatcgacctcgacggtgcggatgccgaaaacgagctgggcggggtgttcctcgccgcgggcaatgagcactgcgtggtgaaacttcgcacgggacacaatgtcgccgattgtcgcagcaattcctacatcaaaggtgttgccggcgggcaggctgtcggggagttctgcggactggtctacgtcgctcccgacgcccagcgcaccgacgcccgccagcagagccgcaacatcctgctgagcgagacggcccgcatcacgacccagccgcagttggagatttacgccgacgacgtgaaatgctcgcacggcgcgacggtggggcagatggatgccgaggcgatactttacatgcgccagcgcggtttgagcgaagcccaggcccggcggttgcagatcgaaggattcgtcggcgacgtggtgacccgctgcggcatcgagccgttgtgcggggcgatcctggaacgggccgcggcgaaaatcgaaaccctgtgagaaatgttcgacgttgaaaaaatacgggaggagttcccgatcctgcaccgcgaagtctacggcaagccgctggtttacctcgacagcggggctacggcccagaaaccccggacggtgatcgagacggtcgatcgccttcaccgggagctgaacgccaacattcaccgcggggtgcatttcctctcggaggaggcgacggtgttgtatgaagccgcccgggagcggatcgctgcgttcgtcggggcggccgaaaaggaggagatcgtcttcacggcgggcgccacggcgtcgctcaacacggtggcttacgcctggggcgacgccttcgtcggagcgggggacaacatcctcgtcagcgagatggagcaccactcgaacatcgtgccgtggcagatgctggccgaacgcaagggggccgaaatccgcgtgctgccgttcgacgaggcgggagcgctgcgcacggacctcctgccgtcgctcgtggacgaacgtacgcgcgtggtggccgtcacgcaggcgtccaacacgctcggcacgcggcccgacctgcggacggtggtcgaagcggcgcatgccgtcggggccgttgtcgttgtcgacggctgtcagggcgtggttcacggcggggtcgatgtccgggcgatggactgcgacttctacgccttctcgggccacaaactctacgggccgacgggaatcggcgtgctgtacggcaagcgcgaactgctggaacggatgccgccgttcatgggcggcggcgacatggtcgacacggtgacgttcgcgaagaccacctatgcccccgtgccgctgaaattcgaggccggaacggccaatttcgtgggcgccatcggactgggcgaggcggtgaagttcatgcagcggttcgaccctgcggagatcgaagcccacgaggaggcgctgctgcaccgcgccacggagcggctggaggggatcggcggactgcggatttacggcacggcgcccggcaagtgcgccattctctcgttcaatgtcgagggggtgcatccctatgatatggggatgattctcgacaagctgggcattgcggtccgcacgggccagcactgcgccgagccggtgatggaccactacgggacgacgggcatgtgccgggcctcgttcgcactgtacaatacgcttgcggaggccgatgcgctggccgccggggtcgaacgggccgtgaagatgctgcgcaactgaaaattaaaaactactacctatgttcatcgtactcgaaggcttggacggagcgggcaagtcgacccagatccggatgttgcgccagttgctcgcagaacgtggcgtggagagcgaatacgttcattttccgcgttttgatgcgccggtctacggcgaactgatcgcccgctttctgcgcggcgaattcggcggcgtgaacgaagtcgacccctatctggtggccctgctcttcgcgggcgaccgggcggcggccggcccgcagatccgggcgtggatcgccgaaggcaaagccgtggtcctcgaccgttacgtctattcgaacgtgggtttccagtgtgcgaaactacctgccggcgagcggcgcgaccgcctcgcgcagtggattctggacctggaattcggttacaacgacctgccgcgccccgatctgtcgctgttcctcgacgtgccgttcgccttcaccgaacgaaagctcacggaggtccgcgagggagacgaccgcgactacctgcaaggcagccgggacattcacgaagacgctctcgacctgcaacggcgcgtgcgcgaggtgtacctcgccgccgcggcgaaggacgattcgctgcgtgtggtcgattgcagcgatccgtcgggggcgatgggttcgcccgaacataatttcgaaaaaatacgggccgtgctggccccgatactcgacgcgcgatgagaaagacccggactttcaaaatcgcggccaacgtctgccggctgatcctcgcctgcacgttcatcgtttcgggtttcacgaaggtgatagatccgtggggcacggcgctgaaggtcaacgagtacctttcgatctacggactcgactacctgcagcccggggcgatggtcttttcgatctggctgtgcggagcggagctgatgatgggctgcatgctgctgttcaaggtccgtatccggcttatttcgatcttcgccgtgctgtcgatggttttcttcacgctgctgacgctgttgagcgccacgctcatccccgtcgaggactgcgggtgcttcggcgaggcgctgaaacttaccccgtgggagactttcgtcaagaacgtcgtgctgctgccgatggccttcgtggtgtggtggcgttaccggcccgacaagattttcgccttcaaaccgctggagatcgtgcttacctgcacgttcttctttctggcgatgtacctcggctattactgttacattcacctgccgctcgtggatttcctgccctataaggtcggggtcaatatccgcgaggcgatgcaggctcccgtcgtcgagccgggcgagtcggaaaccgtgctggtctaccgcaacaggcggacgggccgcgagcgcgagttctcgctggaagacaccgagtggcaggatgccgaaaaatgggagtgggtcgacacccgcaccacgagcgaagtcccggccgtgagacctcttgtgagcgaattcgccctgcgcgacgccgagggcgacgccacggaggaggtgctgacgatgccggggcgggtttacatgctctgcgtcacggctttcgaccgcctgccgcgttcgtgcgcacggcgcatggcccggcttgcggagcgcgcccgtgaggagggtgcgcacgtggtctgcctgacgcccgatccgctttacggcgtcacgtggcacgagttcggcacggtggaggtgcggtgctacaacatcgacgcctcgacgatgaaaaccatgctccgcgccgataacgggcttgtcgtgctggacgacggaaccatcacctctaaaaagaactgtcgcgatattcgtccgtaggggcatcctgcgggacgctggtatgaaagttgacgccggaaacggtgtcaacttttttcgtatgcgaatcatccccattttagcgatcgccctgcttgccggggcgtgttcccgtaagacgcccgcacctgcggtggtacgccccgtgaaggtggcgacggctgccggcgcgggacttatcgacaaggatttcgccggcatggctactcccgacgacgctgtgaacctcgccttcaaggtggcggggcaggtcctcgacgtgcccgtttcgcagggcgcgggcgtgaagaagggggagctgctcgccgaactcgacccccgggacatcgagttgcaggtcgcggcgacccgctcggccttcgaggagacccgctcgcagcagcagcgcatgcagcggctgctggagcacgaggcggtgtcgcggcaggaggccgaagcggccgcgacgcgctatgcgcaggcccgctcgacctacgagaacaccctcgacctgctgaaggacacccgcctgaaggccccgttcgccggggtcgtcgagcgcaagtacgtcgataatttcgaacgcgtgcaggccggacagccgattctccggctggtcaatcccgtcacctcgaccgtccagttcacgctgcccgaaaacgcgctgccgctgttgcgggacagctccacgcgctttaccgtcgcgttcgacaactaccggggcgcggccattccggcccgcctgaaagagtatgtcgaaacctcgtccgacgcctcgggattccccgtgtcgctgactctcgaaaaccccgatccggcccgttaccgcatctcgcccggcatgtcgtgcacgatcaccatgttgagcgccgatcccgttcccgatgccgtgtcgctgcccgtttcggccgtctacgccccggccgggggcgggacctacgtctggatcgtcggcgcgggcgaccgcgtcatgcgccgcgaggtgacgctcggggagctgttcggccgcgaccgggtggtcgtcgacagcggtgtcgcgcccggcgaacgggtcgtcacggcgggcgtttaccagctgcgcgagggcgaacgggtccggatcttaaactgacgccgccatgaacctgcccgaatattcgctgcgcagcgccaaggtgatctggttcttcctcgccgtgctgctggcgggaggcgccctggggttcgccacgctgggcaagaaggaggatgcggtcttcgtcatcaagtcggcgtcgctcgtctgctcctatccgggggccacgccgcagcaggtcgaggagcttgtcactgaacccatcgaacgcgaggtgcagtcgatgcgccgcgtgcataaaatcacttcggaatcctattacgggctttcgaagatacaggtcgaactggacccggccacacccgccgccgaaattccgcaactgtgggacgaactgcgccgcaaggtgctcaacgtccagccgcgcctgcccgcgggggcttcggcggtgaccgtcgccgacgatttcggcgacgtgtacggcatctactacgggctttcggtcgacggaggcttcacctggtccgaactgcgcgactgggcgcagcggctcaaaacggcgctcgtgacggtcgacggcgtgcagaaggtggccctttacggcgaacagacgcccgtggtgaacgtctatgtcagcatggcgacgctggccaatttcgccatccgtcccgaaaccatcgtcgcgaccatcggccagcagaattccatcgtcgacagcggcgagaagcaggccggaaaactccagatacagattctcgaggacggaacctacaagacgctcgacgacctttcggaccagctgctgatctcctcttcgggcaaacagtaccgcctgggcgacatcgcccgcgtcgagcggggctacgccgagccgccgcagacgatgatgcgcgtcgacggccgccgcgccgtgggcatcggcgtctcgaccgaggagggcgtcgacgtggtgaagaccggtgcggagatcgaatccctgctggcttcgctcacgcggcagatgccgctgggcatggagctgacggtgctctatcccgagaaccgcatcgcccgggaggccaattccacgttcattctcaacctcgccgagtcggttgcgatcgtcattctgatcatcatgctcgtcatgggcttccgcgccggggtgctgatcggcagttcgctgctcttctcgatcggcggcacgctgctcctgatgcagtttctgggcgaggggctcaaccgcacctcgctggccggtttcatcatcgcgatgggcatgctcgtcgacaacgccatcgtcgtcaccgacaatgcacaacaggccatgctgcggggcgcggcacgccgcacggccgttgtcgagggagccaacgccccgcggtggagcctgctgggggccacgctgatcgccatattctcgtttctgccgctgtacctcgccccctcgtcggtggccgagatcgtcaagccgctgttcgtcgtgctggctctctcgctgctgttgagctgggtgctggccctgacgcagacgccgctgttcggcaatttcatgctcaaggtgaaacctgtcgccggcgatccctacgacacgcgcttctaccgcgccttcgaccgcctgctggccgccctgctgcggtggcggtgggccgtcgcggcgacggtcgcggggctgttcgtcctgtcgctggccgtcatggggctgatgccccagaacttctttccgtcgctcgacaaaccctatttccgggccgacgtgctgctgcccgacgggtataatatccgcgatacggagcgtaatctgctcgccatggaggagtggctgcgcgcgcagcccgaggtgaagaccgtctcgatgacgctcgggtcgacgccgccgcgttactatctggccagcagtagcatttcgttgcgtcccaatttcggcaacatcctcgtcgaactgcacgacaagcggcagaccgaggccgtcgaggagcgtttcaacgcctatgtcaccgcgaattttcccgacgtgtggctgcgctcgtcgctcttcaagctctcgcccgtgcctgacgcggccatcgaattcggcttcatcggcgacgacgtcgacacgctgcgccgtctcgcggcccgggccgaagaggtgatgtggcgcacccccggagccgtaaacatccgcaacggctggggcaaccgcgtgccgatgtggcagccggtctactcgcagatgaagggccagcgcatcggtatcacccgcagccagatggcccgcggcatcaccatcgccacgcagggatacacgctgggcgaataccgcgagggcgaccagttcatgccgatccttctgaaagacgagaacatcggttcgtataacctgaccaatttgcaggccctgccgatcttcaatccttcgggcaaggtcttttcgattgagcaggcgaccgacggattccgtttcgatttccggccgggcgtcatcaagcgtttcaaccgccagcgggtgatgaaggcccaatgcgacccgggccgcggggtcaacaccatgcagttgttcgccgcgctgcgcgattcggtggaccgcgccgtggtgcttcccgagggctactcgatgaaggtcttcggcgagcaggagagccagcaggagtccaacgaggcgctggccgaatacatgccgctgacgctggtgctcatcctcatcgtcctgctgctgctgctgcgcaactaccgcgagccggtcgtcattctactgatgatccccctgatcttcatcggcgtggtgctgggactggccgtcacgggcaaggtgttcaactttttctccctgctggggttgctgggactcgtcggcatgaacatcaagaacgccgtggtgctcgtcgagcagatcggcgtgctgcgggccgcgggcaaagacccctacgaggccctgacctctgcgacgcgcagccgtatcgtcccggtggcgatggcctcgggaacgaccattctgggcatgctgccgctgttgttcgactcgatgttcggcgcgatggccgccacgatcatgggcggactgctggtcgccacgctgctgacggtctgcgtcctgccggtggtctacgcgctgttctacaatatccgcaagccatgaagataacagtttcgataatcgccctttggctctgcgtcccggcgctggggcagacctcgctcgccgactaccgcgctgccgtcgccgattacagctggcagctgaagatcgccgcctcgaagagcgatgcggcggccgagacggcggggcaggcccgtacgggctacttgccgcggctcgcgatggacggcagtttcacggcgaccgtgcgccatttcgacggcgtggaacgctggacgttcagcctcctgccgcagctggtgcagaccgtctacggcggcggtgcggtgcgggccgcggcccggcaggccgaactgggctacggcatcgcgctgtgcgacgaggagttttcgcgcctcgacgtgcgctatgccgccgactacgcctactggaacctctcggccgtggaactctatgccgcctcgatgcggcagtatgtcgcgatcatccgttcgctcaaggaggtcgtcgaccgccgcttttcggagggctatatcgccaagggcgacgtgctgatgatcgacgcacggttgagcgaggccgaatactcgctcgtgagcgccgagcagagttacgaggtcgcgctccataacttcaacatcctccgcggaaccgacgccgcgctcggcgtacagctcgcgcagggcatccgcgactcgctgccgatgcccggacgggtcgtggcggccgaggcgctggagcggcgtcccgactatgccgccgcacggctgcgctcggagcaggccgaggcgggaatccgggccgtccgcgcgccgttcaatccgcagttgagcgtgggtgtcggcggcatgtggcagccctattaccccaacagcacgggggcgacctacgtcgacggatcggctttcgtgaaactctccgtgccgatcttccactggggcgaacgccgccgggccgtgggggccgcgcgcgccgtgcagttgcagcaggagtggaacgccgcgctcgtgcacgacgacatcgtgcgcgaggagatgaacggctggacggccctcgtgcagagccgcgcgcaggtcgacgcctcggaagagagcctccgcatcgcgggcgagaacctctccatcagcacctattcctacggcgaaggcctggcgacgatcctcgacgtcctgcaagcccagttgagctggattcagctctattcgaacgccatccgggcgcattacaactatgccgtggcggtgtcggactaccagcgcatcacggcgcaatagaaaaacggcggagaatctctccgccgttttttcctgccgccgggcgttctacgccttcgccggctgggtgctgaccaccgcgatttcgcgcgacacgggtgcgatcctgcgcagcatctgcaccatgccgcagtacttttcgtgtgtcagttccagtgcgcggccgaccttcgcctggtcgtcttcggagctgcattcgacgttgtaaaccacatggaacgagcggtatacgctttcggattgaaccgtctcggcggataaatcgcccgaatagctgatttcgaagcgtttgggcgtgatgcgctctttctgcatgatcatcagcgccgtctgggcggagcattgcgccgcggcgtagagcatcagggtcttgggattcatcgcgtcgcatccggtgccgttttcggtccggaatttcccgtttccggacatctgtaaagttactttttcaatcatggatttcggtttttgtgttcaacaataacccgggggcaaattccgttcctttggtagtgtgcggatgggcaaaaattcgtatatttgcccgtatttagtgaaacaatgcatatgcgaaaattccggatttcattgctgacccttgcccttgcggcgtgcgccttcggcgcgcaggctgccgggcctgaaatagagaccctcgcggggcgcgcccgcgacctgttcgattacggccgctggagcgacgcccggcaggaattcctgcgcgtcagggcggcgctgacgccttcggaccgcctgctggcccaggaggcggatttttacctggccgcctgcgccgtggagctgggcagccccgatgccgaaggggccttgcgcgaattcgcggagcgttatcccgaatcggtctacgccaatgacgtgcgtttcgcgctcggttcgttctactgcgccgcggggaacatggaaaaggcccgcgaggctttcgagcagaccgattacaaggcgttgagcgcgccgcgccgcgagcagtacgacatccgcatgggctacgtcgcgttcgccgggggcgactaccggaaggcgtacgactatttcgaccgcatcggcagccgcagcgaatacgtcgatcacgcccgttactacaaggcctatatcgactacgccgaagggcgttacggccgtgcgaagcaggccttcacggcgcttctgcgcagcgacgcctaccgcgacgtggttccctactacctcatgcagatcgagttccgcgagggcaactaccgctatgtggtcgaaaacggcgagacgctggcccgccgggccgttcccgagcggcgcgccgagctggagcgcgtggtcgccgaatcgtggttccggctggaggatttcaacaggacgctggagcacctcgcggctttccggaaggccggcggggagatggaccgcgacgccagctacctggagggcttctcgctctaccgcacggcccgctatgcggaggccgcggagtggctgcgcaaggcgtgcggcgccgaagacgcgctgacgcagaacgcctcctaccacctggccgactgttacctgcgcgccggggacaaggagtcggcgatgcaggctttcgcgatggcttccgacgagtcgctcgacgcgacggtggccgaggacgcgctgttcaactacgccaaattgcagtacgaactgggcggcggcgccttcaacggcgcgatcaacgtgctgacgcgctatgtcgaacgctatccttcgtcgccgcgcgcggaggaggcccgtgcgctgctgatcgccgcttactacaactcccgcgactacgatgccgcgtacagggccatcaaacagatgccctcgggcgacgccgacatccgcgcggcgttgcagaagatcacctatttccgcgctctggaggcctacaaggcgggcgacatgcgtgcggcgcagcgttacctcacggaatccgccgcggtgaacgtcagccccaagtacaccgcgctgaatgccttctggcagggtgaaatcgccttcgcacagggcgactacccggtggcggcggccaaatacaacgcctacctgaagcgtgcgccccgcaccgagcgggagtatgcgctggcgtggtacaatctcggttactgcgccttcgaccgcaacgacctggggcaggcgcaggcttcgttccgaaagttcctcgccgcctggtcgccgcgcgaccgttaccgcgccgacgcctacaaccggttgggcgacgcggcctattccgaccgccgtttcgaggaggccgtgggggagtatgacaaagccatcgccctggcgacgcccgaacagcagtacgcccgctacaaacgggccgtgacgctcggcatcctgggccgcacggaccagaagcagcaggccctgcggcagatcgccgcttcgggcggcgactatgccgacgaagcctcctacgagctgggacgcagctacatcgcgcaggagaagtatgccgagggcgccgcgcagctcgaaaagttcgtggccgcctatccgtcgtcgccgcgctgcacgcaggcgctatccgacctcgggctggcctacctgaatctgggcgacaagcaaaagtcgctcaagtattacgatcgggtgatcggggcgtcgccccactcctcggaagccaggggcgcgatgcagtcgatccgcgagatctacgtttcgcagggcgacgccgacgcctatttcgactacgccgccaaggccggactggagagcgacctgacggccctttcgcgcgactcgctgtcgttcgccgcggcacagaaactctacctcgacggacagcaggaggctgccgcgaagtcgctgcgcagctatgtgcagagctatccgaaggggtattacctgaccgacgcgctctactatttgagcgactgctacctccgctcgggcgagcgcggggaggccatcgagacgctcacggcgctcgccgaccgggggacgacccagtacacggtcgccgtgctggagaagctctccgagatgacttatgccgacgaacgctgggacgaggccgcctcggcctaccgccggctttacgacgccgcgccgaccaaaacgggccgcgaggaggccatgaagggttatgtgcgtgcgacggtggccgggggcgacggggcgaagatcgccgcgatggccgccgacgtctgcgggcacgacgatgcgggggccgcggcgctccgcgaagcgaagtacgcctgggccgggcaactgcgcgccgaaggccgccgcgacgaggccgtgaagctctaccgcgaactggcgaaggacgtgcgcacgaaagagggttccgaggctgcctattacgtgattgaatccacgttcgggagcggcgacatggacaagaccgaaaaggaggtcttcgccttctccgaacgggagccgcaggcctactggctggccaaggcctttatcctgctgggcgacgtgtatgtgaagaaaggggataatttccaggcccgggcaacgtggcagagtgtcgccgacggttattcgcctgccgacgacggcatcgtggacgaagcgaaggcgcgaatcgcaaaactcaactgacgatgaagaagatgctgatagtggccgctctcgcggcggtgctgccgcagttggctgcggcgcaggtcgaaaagcaggtcgaagtgaccaaggcctatgtcccgaaggtggagagcgcctcgaaactggccgtccagcccgatatgaccgacacggcgcgcatgcgccccgaaatcgactacaccattacgccgctgtcgttgcgcacgacgctctcgccgcgtccgatccgccccgcgacggtgacctactgggagttcaaccgcccgctgcccttctacctgaaggccggggcggggtatccgctcaactcggtgctggacttctacgcctcgtcgcagaatccgtcgacgggctacgtcgtggggtacgtcaaccacgaggggcggtacgccgatattaaaaacgatttcggggtgaagaacaattcgacgcggatgttcaaccgcatcggggccgccgcgggcaagtatttcggccggcacatcctcgaaggcgacatttactacgacaaccggatgtatcaccgttacggggcctgggccgacggagacggtgcgggcctcgggatcggggggatgaacgactacggcgatgcgaacgtcgcggtgcgtttcggagacaattttcaggacctgagccgcacgaactttgaaatagccctgcgcggggggatgttcttcgaccactccgagtggccggattacggcgacaaggcccggcagaccgcactcggggcccgggcgaagatcgcccggggattcggccgcagcaggttctcgctcgaagcgggatacgaattgcggtccgggcagaaatcgctggagggcagcagccagcagctgatccacgccgccctgcgctacggtttcgccggcggggtcgtgcgcttcgacgtgggggccgactactaccgcgaccggaccgagttcgaaggagaaccctcgaacctcgtgaagagtgaaaattatgtcattcctttcgcccggctcgatttcaatctcggaacgccggggctgaaacccttcttcgaggccgacggcgcggtgacgccgaacgacttccgggcgctgacgctggaaaatccctatgtcgcctcctcgacgtggctcgacaaaagttccgtggactacaatttccgtctcggactgggcggcagtctctggcgcagccgcttcgactaccgtgtctacgccggggtgtcggtccgcgacaaccatcttttctggaccacgtaccggagtttgtcggacgatcctgctttttcggaggtttttcagggcgttctggtccctgtgatggcgcggcagaccgtcacttcgttcaacggcgagatcgagtttcggcccgtgagtgcgctgaaattcgacctggacgtgcacggctatctctataacgacgagacggatctgaaaaacggcgctccgtcgttcgccgggaacgtgggcgtcgcctacgagggccgcaaggtctcgttcggggtgaaggcgctgatgcagggcgtgcgccgctggacggtgatcgacctttcggctacgaccgacgcttcggaaccggtctgtggtccgtctttcgaagcgcccttcggcgtggacctgcgggtgaatttcgactggaaggtttcgggccgcgtgacgctcttcgccgagggccgcaacctcgtcaaccgccgcctgtacgaatacccctggtatcccgaactgggagccaatttcacggtgggcgtcaaggccaatttctgaaaccgtttccgccgggagcggttttccggaacgggggctttttcgaaaagcccccgttttttttgcccctcgcgaaagacgacaattcgtttaattgatgatcattttcggctgtcgggaagaaccgaccggaaatttcgctatattggagcgaatttaattcacacgactatgaaacatacaatgcccgagcttccctatgcaccggaagcgcttgctccgaagatgagcaaagagaccttcgattaccactatggaaagcatttgcagacttatgtgaacaacctgaacaacctgatcgcggggacgccttacgaggagatgccgctcgacgagatcgttcgcaaggccgatgggggcattttcaacaatgccgcccaggcctggaaccataccttctttttccggatgctgactcccgcgcagcagccgatgcccgcgaaactggccgccaaactcaccgaggcgttcggttcggtggaggctttcaaggagcagttcaccaaggccgccgtggggctgttcggctccggatgggcgtggctggcgatggacaaggccgggaagctgtcgatcgtcgccaagccgaacgccggcaacccgatgaccgacggactgcgtccggtgatgaccgtggacgtttgggagcacgcctattacatcgactaccgcaaccgtcgtcccgattttctggcggcgttctgggagctgatcgactggcaaaaggtcgccgaccgctgcatcccgaagcggtacaagtgcacggcctgcgactacgtctacgacccggcgaagggcgatcccgagacgggcatcgagccggggacgccgttcgaggagattcccgacgactggacctgcccgatctgcggactctacaagactgacttcgaggctgtcgaggagtaaacgaaaaacctccgcgtgcaaacgcggaggtttttttgtgcccgggtcgcgggaacggatcagaagacgaacttttcgattttcagttcgcccagctgttccagacgcggcacgagggtcgtgaagtgcgacgcctgttcgtgggccgcgagggcctttgcattgctccaggtttcgcagatcatcagcacgtcgctgcgcgtggcgctttcgaacaggtcgtaggccacgcatccctcgtccttgagcgaagcggctgccagctccttggctgtgcgcaccagttcttcgcggttgctttccgtcgtgcggataaatacattgagacgtatcattggtttccagttttttggttttgtcgttttgcaaatataacgaatttttcggtgacggtgcgccgtcggcggaaacaaattgtcgacttccccggaaatcccgccggaagtcccgcttctgcggcgtcggggaggagtccgcgagggaaccgtccggcggctgcggggtgcgagttgccggaattttttgtatcttgtgcctttaaccgcattaattatggaactgaacgacaagaaattcgcggtgctggtcgatgccgacaacatctcgcaccgcaagataaaggatattctggatgagatcgccaactacggcacaccgacgataaaacgcatttacggggatttcaccaatccgaaattcgccgcctggaaagaggtgctgctggagaactccatcacgcccattcagcagtacgcctatacgacgggcaagaacgcgaccgattcggcgctgatcatcgacgcgatggacattctgcacaaggagggcgtggacggattctgcatcgtgtcgagcgacagcgactacacgcgcctggccagccgtatccgcgaatcgggccgggaggtgctggggttcggcgagaagaagacgccgaagccgttcatcaagtcctgcgacaaattcatctacgtcgaaatcctcgggcagacgccgccggagaaggcggcccctgcgaagaaaaaggcggacgcgaaaagatccgccggggccgaagcgcctgtgggtccggccgccgaaactgccggggaaaagaaaccgtcgccggatgcggggcacgcctcgacgatcatccgtccgttcgacgacgaattccgcacgctgctggagaacacgatcgacgatgccgccgacgacagcggctgggcctctctgggcgacgtgggcagcgtgctgtcgaagaagatgccggatttcgacccccgcaactacggctacaagaaactttcgctcctggtccgggcgctttccgatgccgtcgacatgaagacggagcagcaacgggtctacgtccgcaaccgggtggggtagggctttccgtatttcgggagggatcagagcgggccgaggctcccgcgggcggcttcgtattcggcgacgagacggcggaggatctcgccggccggcggcaggtcttcgatgagcgcggcgatctgtccgatctccagttccccttcgtcgaggtcgccttcgaaaatcccccgtttcgggcgtccgcggccgatcagggccgacaattcttcggcgtcggcgccgcgcgattcggcctcctcgaccgtgcggcagaaaccgttgcggatgaggcgcgtcgggatcacctttttgagcgtcaggatcgtgccgccctcctgtacctctacgcaccgccgtttgaacgcctcgcaggccgaactctcccgcgacagcgcaaagcgcgtccctaactggcatccttcggcgcccagggcgaaagcggccagcatgccggcccccgtggcgatgcctcccgcggcgatgagcggcaggtcgacggcctgccgcacctgcgggacgagggccatcgtcgtcgtctcctcacggccgttgtgacccccggcctcgaatccctcggccaccacggcgtccacacccgcttcgcggctcttgagcgcgaatttcgaactcgacaccacgtgcgccacgcggcagcctgcgtcgtgcaggcgtgcggtccaggtcgcggggttgcccgccgaggtgaagacggccgggacgcgctcttccgtgatgacgtccatcagttggggcgcataacggtaggccagcggcacgttgacgccgaacggccgggaggaggccgcacggcatttgcggatgtgctcgcgcagcagttcgggggtcatcgagccggagccgatcagccccagcccgccggcctcgctgacggcggcggccagccgccagccgctgcaccagaccatcccgcctgcgacgacggggtagcggatgccgaaaagggtcgtgattctgttttccatcgttttctggttttctgcgggattaagatacaattatttttccaaaacgggagcggatgttccggaaggtatgcgcaaaaaaaagcggcgcttcgacccgtcgggtcaaaacgccgttatgaaaaaaaagggtgagctacttacatcgcaccgctacgaccacatacccttgctcgattcctcgcctgggggattctgtaggagctggtcgtgtaagactcacccgggcacaaaagtaggaaaattttatatctttgcaaaaaaaaactgaaatgcgtaagaaaatattaggttggggtctgctggcggcgttcgtcctgacggccggcgcagggcttgtcctgcggcagcagttctatggaaatgcggtcgttacggagcgggacctctacgtgagcgcccgggccgaatacgggcaggtcgcggactcgctgctgccgcagatcaaacaccgccgggctttcgacgcctatgcccggaggatcaacctgtccgaaaccttcaagcccgggcattacgtgctcaaacacggcatgagcgtcatcgaaatcgcgcgcatgctcaagctggggttgcagacccccgtgcgggtgacgatcaacaacgtgcgcatcccggcccagctggcgcagaaactcgcacggcagatcgacgccgattccacggcgatcatgcaggcgctgacctcggaggagctggccgcggaggtcggattcgacagcgtgacgctcttttcgatgttcattcccgacagctacgagttctactggacggtgacgcccggggagttcgtcaggcgcatgaagcgcgagtacgaccgtttctggacttccgaacgcgatgtaaaacgcaagcgcagcggattgagccggctggaggtgatgacgctggcttcgatcgtctacgaggagacccgcaagagcgacgagatgccccgcgtggccggggtctacgtcaaccgcctgaagaagggcatcaagttgcaggccgacccgacggtgaagtacgccatgcaggatttcggcctgcgccgcatcctctaccgccatctgaaatacgattctccctataatacgtatgtgaacgaggggctgccgccctcgccgatctgcatgcccggaaagaacgccatcgacgccgtgctgaactacgaaaagcacgactatatcttcttctgcgcacggcccgaattcgacggttaccacaacttcgccaaaacccttcgcgagcacaataagaacgcccgggcgtacagcgacgaactcaatcggcgtaagattaaataattttcgtatctttgtcatcccatgcttgcgaagatatacgaacagaacccctcggagaaggagttgcagcgcgtcgtagacgccctggagcgggatgaaatcatcatttatcccaccgacagcgtctatgccttcggctgttcgctgcgctcgccgaaggccatcgagcggctgcgccgcatccggggcaagagcgaggagaagttcaccgtggtcttcgaaaacatcgcccaggtcgcggagtactgccgggtggacaatgccgttttccggattctgaagcgcaatctgcccgggccgttcaccttcgtgctggcggcttcggcgcgcattccggacaaggcgctcgaacggcgccgcacgatcggcgtccgcattccggccagccccgtcgcgcgggccgtggtcggggcgctggggtgtccgatgatcaccacgtcggtcaaggacgatgaccaggtggtggagtatacgaccgatcccgaactgatccacgagcgttacggccgcgaggtcgcgctggtcatcgacggaggcatcggcgacaacgtccccacgacggtcgtggacctgacgggcgacgggccggagatactgcgcgaaggcaagggtgaactgcaatgaagagggggctgatgccgccgcgcggcaaggctggcgcctcggagtgttaaaaacaaaatagaaaaatggagaagaagaatttctggaacgaagccgcgaaatacggtgtgatcatggctctggtcgcgatccttttcgacgtgctgggcttttacgtgcagaacacgctgctgtccctgctgtcgctcgtcattttcgtcctgctgctggggtatttcaccaaacgccgcgcggaacgcttcggagccaggggatacggctacgggcagtgcctgggtttcatggtcagcgtgatgctctgcgccgggtttatcgagggagccttcatgggcgtcgcctccaactggctctttgcggccagatacgaggcgatgatcggtccgtcgatcgccatgctggagaacaccgggttctacacgggcgaccagatcgagatgatgatgaaactgatgcgttcgccgctggtgcagctcttcagcggaatgctcgcctcggctatcaagggcggctttttcggtctgtttattgctgccttcaccaagcgtgatcccgacgttttctcggaaggcactaaccaataaggatggataaactgaatatatcggtcgtcgtgccgctctacaacgaggcggagtccctgcccgaactggcggcatggatcgaccgcgtgatgcgcgaaaacgggttttcgtacgagcttattctggtcgacgacggttcgtcggacggctcgtgggaggaggtcgaacggctcaagaggcagtatccggccatccggggcatcggtttcgcgcgcaactacggcaagtccgcggccctctactgcggattcgcggctgcggaaggcgaggtcgtcattacgatggacgccgacttgcaggattcgcccgacgaaatccccgagctgcgccgcatgatcctcgaagagggctacgacctggtctcggggtggaaaaagaaacgccacgacccgatcggcaaacgctggcccagcaaattcttcaactggacggcccgggccgcgtcgggcatccggctccacgatttcaactgcgggctgaaagcctaccgccgcaaggtggtgaaggccatcgaggtctacggcgagatgcaccgcttcattccgttcctggccaagcaggccgggttcggccgcatcggcgagaaggtcgtagaccatcgcgcccgcaagtacggcagttcgaaattcggcctcgaacgcacggtgaaagggtatctggacctgatcacggtgctgtttatgacgcatttcgggcgttcgccgatgtacttcttcggcagcctcggaacgctgatgttcctcatgggcggcggcacgacggtgtggatcatcgccgagaagctctggaagcagagccacgccctgcccctgcgggcggttacggaccagccgctgttttatctggcgattttggccgtaattctcggcgttcagctgtttttggccggatttttgggcgagctgatcaacagagggtcttccgagcggaacaaatacctgatcgacaaaactttgtaaatgatgatacaacgaatccaaacgctttatttgctgatcattgcggcgcttatggccgtgacgctcttttcggggctggcgtggtttgcgggtgacgccggcgagttcgggctttacgccttcgggttgaaaaccgccgaaggggagcttgtccagtccaccgtctatatgggcgtcctgctggcgctggcctgtgcgctgccgctggtgacgattttcctgttccgtcgccgtttgctgcaaatacgcctctgtgtggtggaaatggtgttgctgttaggctcgctggtgatggaaggcgtctattactttttgagctggcgggtcttctccgacctgacgttccatacgcagggcttcaagcccgccattgtgctgcctctggtctgcctgctgtttgcctatttggcggcccgtgcgattttccgcgacgaactgctggtgcgcgcagccgacagaatacgctgatcgagcggatactgctgacccggagtatgcccgagcgcatgttccgggtcttctgtccccgtcggcgaactgctgttcggacggaaaagggttgcaattcggaccgatctgattattaaaagaatgttacaaacctttgcaggtccggaaaataattttaactttgaggcataatattgtcattatgtagtgaatttaaagaattttggctacaaacaatacattttttaactaacactcaactctatgaaagtagtaaatttttggaagacattgttctgtgcagcgctggccgtgacggcttttagcgcatgttcggacgatgacgaagagggcggttattcgggcatgcccgaaattaccgtgaacggcggcgagtcggtgactgtcgccgggaaactcgagggcggcaagctcgaacagacggtcgaggtcgtttcgaaaggcgactggaccctgacattcaagaaccccggggattcgcagtgggttactcccagcgcgatgtcgggcaagaccggtacgacgcagcttaccttcacgctgggtcaggcttcgggagagcgcagcgcaatccttgttctgaccgccagctccacggtcgagggcttcccgcttacggacgaggctacgatcacggtcgtacagagcgacagcgatgttccgacgggtaacgctctttacagcgagaactgcggcacgaaggtcgagaaagtcgatggctactggccttatgtggacaagttcgaaggttggacccgcggcggttcgctcgatcagaaggccgttacttacaccggcaacagcgcttcggtagccaacagcggcaagggtttcgatcctgccgaggatgaaacgacggtagttacgggtcctccctatgtttcgatgaacaaatcgacttcggttttcaacatcaatgacatcaatatcgcatcgaacaccaacttcaccttcacgtttactgccgctcagcaggttaactattccggtggcgtagtgctgggcgatgtgacggatgaaacgattcggttctcggtgtctaccgatggttcgagctatgctcccgttgctctgaaagtcaaaaaagtcgcttccggctactggtatctctgcaccgccgaattcaaactgcccgccggtgtttcgaccgacaagatctgggttcgtttcgacggctatgcaggacttgaaaaccacggtctgcgtatcgacgacttcaaactttatgaaggcggcaacggttcggaactcgtcgttccttcggtggattatacgaagggtacggttgccgaggctatcgcagccggagccggcaagaactacgaggtcgccgctacggtcgtagccatgcacacgcagggtatcctgatcggcgatgcgtcgggtgtcatgctggcgttccttggcgaggctcctgcggtagctgttaacgatgccgttaccgttaagggaacgaccgaattgcggaatggcgtcattcagttcggcaaggagggtctttcggtcgccaagaccggcacgggcagctataacacgcctgctcccgaggtgatggacggcacggctgtcacggcctatatcgcaacggccttggaaaataaggctgtgtacaagtatgtgaaatacaacggtgagtttactgtcagcggcaactattacaatgtcgttatcgccggtacgaccacgaaaggctctgttgcctatggcaaatcggagtgggcgtcgtttaatgacaaaccggtgactgtcgaaggctggctgctcggcggtacggccaactatctccagacgatggctacgtcggtgacggtcgattcttcgacgccgattgttgaaatctccgctccccagcagttcgctgcaacctctcccgtggctcaaacgctcaactatacggttaccaacacgacggcttcggctgtaacgttcgcaatcgagggtacgaatgccgacaagttctcgctcggcaccaagactgataacaccatcgtcgtaagcgcgaaaggcgacaatgcgagcacggcggcttatacggccaatctggttgccaaagttgccggtgcgacggttgcaacggttgctctgaagcaggcggcgcctgcgagcggtgatgatacgaagggaacgtatacgtcaatggcgggtatgattccaaccgcagacaattcggctaatgctatttatactgctgaaattacggttcccggtagttcggttgttgccggaatgaaatttggcacaggctctaaagcaggcgtctttacgaccggggcattgggcgtgacaggtaataagaagttgtcgttctatgctgttgcatggaaaagtaagagtgctaaactttacgttcgcgtagacaatggaggctctgtttctcctgtatccgtagacttaagaggggatgatggtgcaaccggtaatccgcctttcaaaacaattgcttggagtgatgagacggattactttacgctcgaactgtccgatttaacggcaagttcaacgcttacgttctctacatcttcgacttttacggcagcttcggatagcagtactggacgagccgttgtctgcggtgttcagatttactaattgcagtcgaggaaaccgacttgtaaaaccaaccactcttggcggggataactccccgtcaagagtttggtttctaaatgggtctgcggaccaaatgttatactttattctgaatgatgttgaaaattaaacagataggcatgctgctcgtgacgatgtcggcgatgcttgtcctgtttgcgggatgcggcgacaaggacgacgggggcgacaaggagtccctcgcgacgctcgttgcagagaccgtgagcagttcaaccacaacgaacaagatttcgacccaaggcccgtcgggcatcaccttcgaggcgacgatcgtctcgcagggcggggatgcggagtggtgttcgttcgatttgaataagcaggtatcctccgccggcggaaacgtcggggacccggcctacctctatttggacaaaaacaattccgacgacgaccgcacggcgcggatcgacgtaacctataccaacggttattccacctccctgacgctgacgcagagggccgcgggcttcatcgactacgaccgttcgtggggcgagcagcccgaatatcgttccgacgacgcttatatctataagacctattatgcgacgtttgtgagcaatcagttctttccgggcggaaaactgcgcaactattcggtatgctacgatgtcgaccggcatatttcgcattgggtggcttatccgatcttcaagaaggtctacgaaacgcccgttttgagccgggtcaacgatttcaattacgatcccaatgaccagctgcccgtgattcccacccgcgaccagcaatacatcgggacaggcggcaacggccgcggttacggtgcatggggttacgaccgcgggcacatgcttccgcaggcttcgcgttacaacaattacgagccgaaccggatgacttactacggcaccaacatgatgccccagaacagcacgctgaatcagaatatctgggcctcgctggagggcaaagtccgtggctggggaggcttgcagacctacgatacgctctatgtggtgacgggagccgctttcaagagcacgaagaccatcgacaatgccaacggaccgatcgccgtgccgtcgcattgctggaaagtgctgctgcgccagcggggcaaccagaaccggcagatctctcaattcaaggcggatgaactgaaagccatcggcttcgtgttcaccaacgatgacgccggagccgccacgtcgatcgaatcggctgtccgttcggtgaaggagatcgaggagctgacgggcttcaagttcttccgcaacctcgacccggccgtggccgatgcggtgaaaagccagaagaacctcgccgactggtagggattatgatacaatgaattgaaccttaacaacaaaaatcgtttatgaagagaatctttttgacaggactgtttgcctcgctgatcgcggtggcatgcttcgcgcagaagccctacaaagtggtcttctacaacttcgagaacctgttcgacaccattcacgatcccggcgtcctcgatgaggagttcacgcccgaaggacccaagaagtggaactcggccaagtacaccaggaaaatcgggaacctcgaacgggtgttgttcgacatcgccgccgaggataaggattatcccgtggtgatcggcgtttcggagatcgagaaccgctcggtgatggaggatgtgatcgcgcagccgaaactcgcgcccggcaactaccgcatcgtgcattacgattcgcccgacgcacgcggcgtcgacgtggcgttctactaccgtcccgacgttttcaagctggagggaagcgccgccattccgttcaagatgccggaactgcccaacttcaggacgcgtgatttcgtcacgatgtggggcacgatcgacagcgagccgttcttcttcctcgtgagccactggccttcgcgtctgggcggcaaggaggcttcggcccccaagcgtctggctgccgccaagcaggtgaagcacatcgtcgactcggtgaccgccgccaacccggccacgaaggtggtcgtcatgggcgacctgaacgacgatgccacggatgacagcatcgtcgagggcctcaacgccaagggcaagatcaaggaggtcggcaagggcgacatgttcaaccccttcatcggcctgctgaaagcgggttacggcacgctggcttaccgcgacgagtggaacctgttcgacaacatcatcgtttcggagaacctcgccaccggttccacgggcagtctgaaaatccagcccgccggcaactcgaagttctacggcggcatcttccgccgtccctacatgatccagaaggagggccagtacaagggctatccgctgcgtacgttcgtgggcaacgatttccagggcggtttcagcgaccacttccccgtatatatctacatcgccaaataaacactctaaaatatttgtatgaaactcaaagttctacttattctgatgctcgccgccgtgaccttcacgtcctatgcgcaggacggaggcatccgcggtaaggtggtttcgcgcaacggtcgcgtggccttgagcaatgtacaggtgaagatcgaatcgctgggtctgacggccatgaccgacaaggacggcaacttcatcttcgagaatcttcctgcgggcagctacacggtgctcttctctacgcccgacttcgaggacctcaacctgatggtccgcgtgggcaatgagcatgtgcaggacctcaagtcggtgatcatcgtgccgtcggggcagagtgcggttctggacgacgccgttttcgccgaattcgacagcgactcctcgtcgtcggacacgcaggcgctgccttcgtcgctctcttcgtcgaaggacctcttcaacaacatcgcatcgtaccgtttcagcgagatgcgtttcaacgtccgcggctacgattcgcagtactcggacatctacctgaacggcatccgcttcaacgacgccatgacgggctacggtccctggtcgctgtggagcggactgaacgacgcgacgcgtaaccaggagaactacacgggcctcgaagcgtcggatttcggcatcggcggcatcggcggcatgaccaacgtcaacgcccgcgcctcgcagatgcgcaagggattccgcgtgagcgtgtcgaacggcaaccagatgtaccgtttccgtgcgatggtttcctacggctcgggacagttggacaacggctggtcgtacgccttctcggtgggaacccgccagggcggcaacggctatgtggacggcgtttactacaactcctattcctatttcgcttcggccgagaagcttttcggacagaaccaccgccttgcgttgacgctgctggcttcgccttcggagcgcggcgcgcagcaggcttcgaccgacgaggcttacgctctgttcggcaacaactactacaaccccaatgtgggttaccaggccggcaagctccgcaactcgcgcgtgcgcaacacccacgagccgatcgtgatgctcaactatacgtgggacatgtcggagaacacgcgcctgaacgccgccacgtcgctgcgtttcggcaggaacggctattcggccctgacgtggaacgccggagcggacccccgcggcgactactaccgctatatgccgaattcggataagacgcagatcgtgccgggcataaccaccgacgagacgatctatttttacgcgatggatggcgccatagcgaaaggcgtgtgggacggtatgctcgactacgacaaattcttccagacgaatatgcggaatatcgacaccgatccggtgctgtccaaactgatgggtaataacagtcgttcgaactacatgatcgaggagcgtcacaccgaccagctggactacaacctggcggtcaacgtgcagcataacatgcgccacaacatgcgcatcgtcggcggcgccaacctgcgcgtcaaccgcacgaattactactcggagatcaaggacctgctgggcggcgactattggtatgacatcgacaagttcgccgagcgcgacatggccagcgccgaggcttaccagaacgacctggattactactgggctacggggcacgcccgcattgcccgtgccggcgacaagtacggttactactaccgggcgcacctgctcgaaaccaatgcctgggccaactacacgtggggcatcggcggtttctcgctgggcgtctccggatcggtcggctactcgaacatgtaccgcgagggcatgtggcgcaagggtctgttccccaacgattcgaaaggcgattcgaagaaactcgactacctgacctacgatgcgaaactttcgctgggctacaagttctcgggagcgcattcgatcgaggccaatgtggcttacatgcagcaggcgcccaagttcgcgacggcattcgtgtcgccccgtacgcgcaacacgaccacgccggggctgaaggccgagaaggtgttcggcgcagacctcacctacaacctcaacctgccctacatcaaggcgcgtctttcgggatactatacgacgatcgaggaccagtcgaaggtcatctcgttctacgacgatacccgcagttcgttcaccaacttcgccatgagcggcatcgacaaacgctactacggcgttgagttgggcctttcggttcccgtatggaacggcctctcggtcgtgggtgccttgagctggggcgactatacctatacgtcgaatcccaacttcgtgcagacggttgacaacgtggacaagatcgtactgaaagataaggtcaactgggacggttatcatgtggaaagctcgccgcaactggctttcaacatcggtctcgactaccgcggaccgcgcaactggttcgccggtgtgaacttcaactactacgacaacatctatctttcgatgaacccgatgtaccgtacggctaccgccattaagtattatacgaatgtgctgacttccaatacggccaccaatgcgcagaaggcatcggccctctcgtcgatcaagaccctccgcaagcaggagaagtttgacagcgcatatacgttgagcgccaatatcggcaagaactggtatatccaccgggtctacatgctgggcttcagcctcgaggtgaagaacatcctcaacgatcaggacatccgcacgggcggttacgagcagatgcgtatgagcaaggtccgcggcgagggcggcgagcagatttacggccgcttcccgtcgaagtatttctacctgttcggtacgacctactacctgaatgtctatttccgtttctaatcgcgcaaagaacaatttatgaaaagtcttaaaataacattggcggttttgttcggcctcgtggccgtgagctgctacaacgatttcgaaactccggctccgctgaagctctatacggccgacgatatggccgcaatggggcttaaaccggtatccatcaaggtggtgaaggagaagttcggcccgatctccaatacgggaaccaacgacaatttcgccacgaccaagaccctcaagttcggaaatctcacctccgaggagaccaagttcgaaggcatgtcgggctggcccgaggctgctaactactacatcaagggcaaggtgatcagcagcgaccgtcagggcaacatctacaagtcgctctatatctacgacggcacggccggtatcgagctgaagctctacaacggcctttatctcgacttcctgctcgacctggcttcgaagccgatcaagagccagtgggtctacgtgcgtctcgacggtctctatctgggtaactaccgcatgatgctttcgatcggaggcgctccttcggacggcatcaacacggccggcaaccacaagtactacgccaactcgaacctcgacaacccgaaggttgccgccctgaatgtcttccgcggcgaatacacgacgctggagccttcggacatcaaggaggtcgacgcttcgaactacacgtcgctcggcgaggccgatctgggccggctggtgcgtttcaacaagatcaagatccgctatgcgggtgttaagaatcaggatggcgtgacgcctgcgggcctcaagagcggttcgaacgagaatccctatccgagctggatcgtgaccgactggggaacgcccatcttcggcgcatggtatcgctgggcctacaacagcagcgagcagaacgtccgcctgtacggttcggtgctgatgagctataacgatgcggcgcagtacacttcggacccgggcgtttacggcatccgtacgagcggttacagccagttcgccatgaaacccatcccgaaggacggcacggagggcacggtgctcggcatctacggcatctatgcgaagcagagcgatttccagggcggctcgaacgactgggcgcagtaccagatttcggtgagccgtatcgaggacctcgacttcccgcccgagtcgctgctttccgaggagtggatcagggccaatacgcccgcctcgtcgctgacgcctcccgtgaagaacggcggcgacgactacgaaggtgactgatcccgcgtttgagcaataaaaaactgcggcccggtgagggtcgcagttttttttgtgccgcggcggagcgctaccgcttgttccatttgcaggaggtctggtagtagtcgattgcgcggccgacctgcgcggagtccttgcgctccatcgcttcgagatggtgggggttctcctcggtgggaaccacgcggtactgttcgaagcggcgtacgggcgacaggatcgtgaaggtgtcgccttcgaggtagccgaggtcctgataggtggcgatgaacgcgcggttggtgtatgccgggtcgaagatgctgcggccgtagaaatgcgagtcgtagttcatgttgagcagcgacagcagggtaggcatcaggtcgatctgcgagacgatgccgtcgaccactccgggttcgataagcccgggggcgaggatcagcgccggaatgtggtatttctgcaacggaatctcggtgcggccggcgctcgaagcgcagtggtcggccgtgacgaggaagatcgtgttttcgaaccacggctgccgggccgcttcggcgaagaactgccccagcgaatagtcgctgtaaagcacgcctcctgcgcggctcttcgagtcgttggggatgcggattcgtccggcggggtaggtgaagggacggtggttgctgacggtcatcacgtgggcgaagaacggcttgccgctgcgggtctcttcgttgagcgtgcggatgactttccggtaggcgtcttcgtcgcagacgccccagatgttggcgaaggtgatctcttcgggcctgtagcatttctggtcgacgatttcgtatccgttgcccgagaagaaggtctccatgttgtcgaaatagctgttgccgccgtagaaataggtcacgttgtaccccttgtcgcgcagcagggcgcccgtggagtgcattccggcgttgttcggacgcttgatgatgctctggcccgggcagggcggcagcgaaagcgtcacggcctccagaccgcgcaccgtgcggttgcccgtggcgtagacgcggtcgaacgccagtcccagtttgtagagcgagtcgagtacgggtgtgatccgttccgtgttgccgaaccgctccatgtacgaggcgctcatgctctccatggtgatcagcacgatgttgcggcggatctcctccccttcggcgcgcacggcgtgcaggttgtcgcccgtgcttcggtagaccccgtgcacgaaggcttcggcctcggcttcgggacgcgtgaggtagaactgttcgtagtcgagcgtgttcttgacgaaggcgtcgtagaacttgtagagtccgttggcctgcaattcgttgacgtagacgttgtcgctgtcctggaaacgggtgttgaagttcagcagcccgatcgcggcgaacagcgccgcaatgtaggccggggcgattacggctttccacctccagcctttcaggcattcggtctgcacgagttcgcggcggaagaggtaccacgtcacgagcagcgtcacgacgacgatgcccagcgtcatcggcacgacggggtaggactccatgatgttgcccaccacctcgttggtgtagaccaggtagtcgacggcgatgaagttgtagcggacgccgaattcgctccagaagaaatattcgctgatgccgttgaagatgatggcgccgacgtagacgacgatgaagagggcgaaccacaccgtggtccagtggctgcggaacccgggcaggaagagccgcagggcgaaactcccggcccagtagcccagtacatagagtgcgattcgcggggcgacgcttccgtattcgtcgaagatcgtgttgaagaacgccacgtagcagaacgccgccacgagcagggcgaggaggatgtagccccacggttttttgtacttggtgcgcgaaacgctcgacatgaagagccagaggaaaaagaatcctgccgtcgcggcgcagaaatcgttcacggcgcccagcaggaagacttcgcaccattcgccgaatgagaaggcgagagaggtggtctgctcgttgaaaagcagcacgacgcgcagcacgaggccgacggcgacggtcagcagggacagtttgaggtagaggccggtgaccagccgaatacttttttgcatgatgggtttggtaattaacggtgcaaagttaaccattttcagcccgttcggggaaagaaaaggcagccaactgggtggctgccttattcgatcggtttgaaaaattgttcgttttgtcgcttacttcgacgggcgcatgacgaccttcacgaggttgccgtccgccagaatcttcttggcgagcgcctgcacgtcggcgttggtcaggtcgcggatcgcctgttcgtggtcggcgacgtagtccaggcccgagccgtatttgatctggatgtagttcatccatgcgccgttctgttcgaggctgttcttccagctcttgagcatgaattcgcggtgtttctcgatgtcctcgctcttgggaccgttcgcggcgatctcctcgatctccttcatcacgatctcgcgcagttcgtcggccatctcctcgttggtgtcgaacgaaatggtcatgtcgtaggtttcgcgggggatgtacttcgtcgaaccctggacgcgcacgccgtaggttccgcccttctcctcgcggatcgaaatgaggtagcgcgaattgagcgcctgcgtcaggaacgtcagggccattttgtttttgagcgtgtagggcatctctcccgagaagtagtagttgaccgagactttcggctgctgcatcggggctgtgaactcctccgtaacctcgcctttcaccggataggccttgtcgtcgacgtaattgatcggtttgcgggcggcggggatcgaaccgatgtatttctccacgaggggtttcagcgtttcggggtcgatgttgcccacgaacgtgaagacgaagccgttggcgccggggtagagtttcgcgtagatgccgggcagctgctcgaagctgaatttgtcgacgatttccgtcgagatcatctgacggcggggattgtggccgtagacggcgttgatcaccttctcctgcatcaggaagtcggggctcgatttggcgttggcgagctgtgcgaggagcattttcgtgaggttgtccacgtcgtccttgttgaaccggggctgcgtgaaattgaggtagagcagctggagcatcgtctcgatgtccttgggcgagcagacgccgcccatggcgctggtgtagttctccaccgagggctgcaccgaagccgttttgcccgaaagctgtttcttgagttccgtggccgagaatttgccgacgcccgacatcgagttcacggcgggcatcatttcgcccatgtagaactcctcgtcggagagcagcgacagaccgcccttgcccactacgcccaggcgcacttcgtcggccttgaaggtcgtgggtttcacgacgatcttcgcgccgttggccagcgtccactccgtcgttccgagcactttgtcctcggccgtcttcttcacgggcgagcctttgagcacggtcccttctgcgatcagcggttccttgaccacgttgtcctcataggccgtgacctccgatgcggccaccttgtcgcggatggcgagaatctcctcggcggtgggcgtcgcgacaccctccttctcgggagcgttgatcacgatcacctgattcgtcggaaggatggtctgcttcgcgaaggcgttgacggcatccacgttgagcatcttgatcagcatgctgtcgagctgccattcggtctcggcgtcgggcatcggctggtttttctggtagttgttcagataggtctgcacgaattcgttgttgcggcggtcgttgcggttggcgtacgagcgttcggcctgacgcatcaggttttcctgggcgcgttcgaactcgccctgcgtgaatccgtagcggcgcaccttctccatttcggtatagagggtctcgaagccgcgggccagcttgccgtcctcggtcatggccacgaataccgtggcgtcgagcgtcgggatgatgccgatcacgtcgcccgtgcccatgccggcgccgaggaacggcgcgtcgggctgcatggcgatctcctgcaggcgggcgttctccatcgtggtcatgtaggcctcgatcacgttgttggcctcggccagcaccgtgttggcgagctgttcgggaagcgccgggcgcttgatgaagagctgcaccttcgtaccctgcatttcgggatcggtgtagatgctgacgatcggctcctcgttgtcgggaacctcgatggtctccttctgcgatgcgccggcggcgggagccggaatgtcggccatcagcgtcttgatcttggactcaatggcgtctacgtcgatgtcaccgaccacgattacggcctggtagtccggacggtaccattgtttgtagaaatcctccagctccttgtgccggaagttcttcagcccgtcgaggtagccgatcaggttgcggcgctcgtatttcgtgcctttgcccagcgcctgcaacagcttcatcgtcgaacgccacgacgcgccgtcgcgcgtgcgcagctcctccatgatcacgccgcgctccgagtcgatttccgacggctccagcgcgatgaagtgcgaccagtcgtgcaggatcagcagcgccgagtcgatgattccttcgcgcgaggtcggcacgtccttcatgttgtagcacgtgtaatcccagctcgtgccggcattgaggttggcgccgaatttcacgcccacggtctccagatactccgtgagctgtttgcccgggaggttcttggttccgttgaaggccatgtgttccaggaagtgggcgaggccctgctgcgaatcgttctcctggatggctcccacatcgtggaggatgtagaaatcagcctggcctttcggcttttcgttgtggcggatgtagtaggtcattccgttttccagtttcccggtgcggacctccggatcggccgggatcggctggttcatctgtgccgcggcgctgccggcggcgaacgccgcgacggccagcatcaataattttttcatgggcatttgtggtataaggtttattgtttctgtgtctcttcggggcggtattcgatgatatcacccggctggcagtccagctcgcggcagatcgcttcgagcgtggaaaaccggatggccttggccttcccgttcttgaggatcgagaggttggcgggcgtgatgtcgacccgttcggccagttcgccgagcgacatcttgcgtttggccatcattacgtctatgtttatgattatcgccataaagtcgtcccccccccttttatcgtttgcatttctctcatgtcgtctgttttagatggtcagtttctgctcctcgctcaaattctggccgatggcgaagacctcggcggcgaaaaggatcaggatacccatgatgatcattgcgtaggagacgtggaaacccgcgtcgacggtgtatccgcttccggcgagcagttcggcggcgcggctgttcatcacccagtccacggtgtcgctgatcagttcggtgacgatcgtcagcatgccgattgcgcgcagataccagacgttgcgtttgtcgagcgtgcgctcttcgcggatcgagcggcgcagcgagtggatgatcacgaacatcagtacgatgatggccagatagagaagcgggcagagcataaccagcgcatagagccatgcgctgccgccgatcgaacggaatgccagccccagcggggatgtgcccggggcgttctgctcgacgaccagggcgagtttgcggacgttggctttgatttccacgcccggcgccgcggcgatttcgacagccgtttcgggttgtcccgttacccggatgtcgcccagcatgtagatcatgcgcggcacgccggatttccacttttcggcgatgtcgttaccgagttccgcgccttccgccgcgccccgcgagaaattgggcaggattccgtgggcgatgcttgccacgagtacgatgaaaaacgtaatgtaaatgaccagcaggcgttgcaggagcgattttttgttctgcatgtgtgactattttggttttacagttgcaaagatagaattaattttcgaaaaacaaataatatttatcgtttttcgataaaatttttcgcagcggacaaaaaaggacggcacaggcggccgtccttcggatcgtctccggagcgtttactccacgttgtctttcagctgtttccagaatgaagcgctgatggacattgagatcgagatggccagcacgtagaggatgaacatgacgacgaacgtgatgaagccgatgccgatcgcattgcagatggcctggaaaatgccgaatacgatgccgaacagtacgccgacgaccagcgacacgaagaacatggtccatttgctgccgtaggtggcgtcgttcgaagccttgatggcctgtatcggatttttgcccttttcgatgaggaaatagtaggagagcgtccatgcgatcgagagcacgatgcccgggatgaccatgaagagcacgccgatgaaaatcgggaaaatcatcaggcccatcgtgatgaagaactcgcccatgtagcggcggtatttgctgtcgaaaatgcccaggggattgacaatctcacccttggccaactgtgtgggcagtaaggtgatggcgattgtggtacccacattgagataaggtatccagatcgtaatgagccataaggccactgctgcgatcaccgaaggtgcgttctttacgccgatggcgacggaatccttgagggtttctccgaaatcgagttttttcacttccataactaacaggtttaagggttaacatcaaaaacaaaaatacgaaaaaaatcgtatctttgcctgcataaccgtaaaattcaatgcaatggctgaaaaatctcgctataattaccgggttgaaccgcaggacgtggatttcacgctgcgggcgacaatcccttcgctgggcggctcgatactcaacaccgcgggcatcgacgcccacggcaaggggttcggagtcgatgcgctgaatgccgacaaccattcgtgggtgctttcgcgcatggccgtcgaattcgactgccagcccacgcagtacaccgactacaccgtggctacgtggatcagcgattacggccgggtgctctcgacgcgaaacttcacgctgaccgatgccgcaggccgcgaattcggccgcgccgtgacgcagtgggcgatgatcgacctgcagagccgttcggcgatcgacctctcgtgggtgggcgacgcgcatgccgacgccatcgtagatgccgcgcccccgacggacaagccgcgcaagatccgtgcggtaagccctaccgcgacggccgaacaccgcgtggtttacagcgacatcgacttcaaccgccacgtcaacacgatgcgctatatcgaaatgatgctcgacatgctgcccgtcgacatgctgacgcaggaggctccggtgcggctggacattcatttcctgaaagagtgccgtttcgggcagacgctgacggtggggtgcgagttgcgcgggcgttcggcgctgttcgaaatttcggccgacggcgctgcggctgccgtgcgtgcctctatcgaatggaaataggcctgcggggaacgcttcgcagggcgcttgtggaacgggttttgcagtttacggctgcaaaaccttttttcattatggagagcgcaaccaaaacacaagcgaaaaacaagtatcaggtaagcatcgacctgctgaacgatgccgtgggcaaggagatcgccacttcgttgcagtacatgtatttccacactcatttcgaggacgaccgctaccagtatctctcgaagatcatgcgcgagatttcgatcgccgagatgcgccacatcgaggagttctccgaccgcatcctgttcctgcagggcgacgtggacatgaacgcctcgttccgcacccggcaggtcaccgacgtgaaggagatgctgcgcatggccatgcagctggagcagagtacgatcgacagctacaacgaagcctcgcgcatcgcctcggagaacaaggacgccgtaacgcacaagatgtttcaggacatcatcgtcgaggaggagcagcatctcgacaccttccgcaccgagttgcagaacctgatcgactacggcgaggagtacctcgcgctgcaatcggccgccggcagcaagcatacgtcgaagagtttcaaccattccggcggcggcgaatagcggttcgcgcggcggaaagcacttctgacgcaaaaaacggaatccttttgccggggtcccgttttttcggttatctttgtacctgaatcattcgcgggaacctgtgcaaaccccggccggcgcatgagttcctcccgggggagggattcggggcggggcggatctgccgatgcggccggaggccgcaggcgtcgggttgccggatcggatgaacggcatgaaatcgccggaatgctctgatacgatgaaaataacgattttaggacctgcccatccctaccgcggggggctggcctcgatcatggagatcatggcccgcacgttccagcggcggggcgacgaggtcgacatcaagaccttcacgctgcaatatccctcgctgctgtttcccggcgagagccagacggttgcgacgcctccgcctgcggacctccgcatctgccgctgcgtcaatacgatgaatccgctgaactgggtgcgcgtcggccgccggatacgccgcgagcgtcccgatttcgtgctgatgaagtactggacgcccttcatggccccctgtttcgggaccattgcccgcatcgcccgcggcaacggccatacgaaggtgctgtgccagattgacaacgtcgagccgcacgaacaccacctgaccgacaaacccttcaaccgctactacctgcattcggtggacggcttcgtctacatgtccgagcaggtgcacagcgagcttcgcgcgtacagcgacgctccggccttgttttcgccgcacccgctgttcgagaacttcggcgagcgggtcgaacgctccgaggcgtgcgtgcgtctggggctggaccctgcgaaccgctacgtgcttttcttcgggctgatccgcgattacaaggggcttgacctgctactcgacgcctgggcgcagctccggcgtgcgggccgcaccgagggccgccggctgatcgtggcgggggagttctacaccgcccgggagccgtatctgaaccggatcgccgacaacggattgcaggacgaggtgctgctccacgaccgcttcatccccgacgacgacgtgaaatattatttttcggcggcggacttcgtcgtccagccctacaagaccgccacgcagagcggcgtgacgcagatagcctaccagttctgcgtgccgatggtcgtcacgaaagtcgggggactggccgagatcgtgcccgacggccgggtggggtatgtctgcgaacccacgcccgaaggggttgccggcgccatcgaacggatgtacgaaggggacacgcttcaacgcttccgggaaaactgcgtcgaggaacgccgccgcttttcgtgggaggagatgtgcagccgcatcacggagctgtacgggctggtggcttccggaaaatagggggcgccgcagcttccgggagaactgttttttcggcatttcgtttgttattcaggcgaaaagacctatctttgcgggacctaactcatactcttgcatattgtggcgtcacaattcatcaatctgaaatccaggttgcttaacccgtatgtggtatttgccgtctggatgctctgcacggtttggatctgcatcacgcagtcgctggccgggcctcagaactacaacaatttcctggtcttccgcggggtgttcgaccatctgttctcctcgcttcccctttacgagccctatccgctcgaatacggggatatcaaccattacggtccgattttcgcctttatcatcgcacctttcgcggtgctgccgccgtggctgggcatgtcgctgtggtgcatgagcctttcgctgctgctctactggaccgtccggcagctgccgatgcccgtggtgctgacgagcctggtgctgtggctgacgctcaacgacttttacggagcctgcttcaaacagcagttcaacatcgccgtcgcggcgctggtcgtcggggcgctggccatgatcgagaaacgccgcgaaggatgggccgcactgttcatcgtcatcggtacgttcgtcaagatttacggcatcgtcgggctggcctttttcttcttcgtgcggcgcaaaggacgtttcatcgggtatatggctttgtggagcgccatggccctgctgctgcccctgctcttcgtcagtcccgaatacctctggtcgcagtatgcggcatgggccgccgacattgtgcagaagaacggtgagaacatgttctgtgcctatacgaacatctcgctggtgggctgtgtgcgcaagatcagcggttcgccggcctattccgacctgctgatcatcgtccccgccatggtgctgtttctgctctcctacctgcgcaccgggcagtacaaacacttcagctaccgcctgacgatgctggcttcactcctgttgttcatcgtgctgttcagcagcggcagcgaacacagcggctatgtgatagccgcgctcggcatgggtatctggtgggtgaattttcccccccccgcacgcggccggctcgaatggacgctgctcctactggccctgttcgccagtttctcctataacttactcccgactaagttctaccgtggcgtattcgtagcctacgcgctgcgttcgctgccgttcttcgccatctggctccactgcatccggaggctgtggcgcgaggatttcgccgtcacggacgtccttctggactacaaaaccctgcctgcggcagacgaggcggcaaacgaggcggcagaatcccgtcccgcgcggccgggcgacgggctcgacatcgtatgcccgtgttacaatccggctccggggttcgtccctgcgctggcccgctcctatgcggagctttgcgcccggtatccggacaagcgcctgcacctgatcgtcgtcaacgacggttcgccgcatggtttcggcgaggaacagcacggggcgctgcggcaggccgttccggatgtcgagatcgtcgatattccgcacggcggcaagggcgctgccatccgggccggcatcgcccgttcccgggccccgtataccatctatacggacatcgacatgccctatacggcggagtcgatgtgcgaggtgatcgaccgggtgttcgcagggaccgacgtggtgatcgccgtgcgcaaccggagttaccattcgcggctttcgcccatgcgcaagatgatgtcctacgggtcgaaactgcttaaccgcatcttcctcaacatccgccataccgacacgcagggcggtctgaagggcctctcgccccgcgctcgggcggtgatgctgcgcacacgcatctccgatttcctgttcgacaccgaattcgtcgtcctcgccgcacgcgacaaacgcctgcgcatcgaggaggtcgagaccatgctccgcgacggcatcgtcatgtcggcgatgtctccgcgggtgttgttccgtgaattgagaaactttttccgtatcgccatccgcctatgactgtgacactcggtttcgacgtcgaggagttcgattttccgctcgaaaggggccgcggaatcgatttcggcacccagcttgcggtcagctccgaggggctggagttcctgctggacctgctcgcgcggctggagctgcgggccacgttttacacgacggccaattttgccctccaccgcacggaccttgtccgccgcatcgtcgccggaggccacgaggtggcttcgcatgactattaccacgggctgaccgccgggtcggaccctgccggcagccggcggacgctcgaagagctgaccggacagcgcattgtcggctaccgtgccccgcggctggccgccgcttcgtccgcggcgctcgcggcggcggggtacaggtacaattcgtcgatcaatccgacgtggattccgacgcgctacaacaacctccgggccccgtgctccgtgtcgcgggaggaggggctcacgatctatccggtttcggtctccgcgcctttccgcgtgccgctgttttggatttcgctccacgtcatgccgctgccgctctacaaactgctgtgccgcagcgccctgcgccgcgacgggcacctgaacctctatttccatccgtgggagttttccgcacggctgcgcgagccggctttcggtgttccgggctatcttacgcattgttcggggacggacctgcaacggaaattcatccggctgctggagtggctgaaagcccgcggctgtcggtttttgaccacccgcgaatacctcggatgcgatgagtagggtagcgatgatgctccggaggctctatgagagtccgttcgtgcgcttcgccgtggtgggaggcgtcgccacggcggtcaattacgccgtttacgtcgtgctggtgcggtgtttcgacgacctctggccggcccttgcctatttttgcgccttctgcgtcagcatcgtctgcaactttctgctgtcgagctatttcacctttcgggtacggccctctgcccgccgtgccgtgcggttcctgacggcccacctcatcaaccttgtgaacgaactcgtactgctcgaaatctggctgtgggcgggcgttccgaaactctatgcgccgctgtgcgtttttctggtcgcctttccggtcaatttcctgatggtgcgcttcgccctgcgcgggcgtttgaaatcctgaaaaaacggaccctgccgtgcgatgcgcggcagggtctccttcttcatttattcgggtgtagcttgggctacttcttgatattgggcagttccagcccgtatttctttttccggtcttccgctttgagccacagtcccagcagcatcgccagcacgccgcatgcgacgaaaatcagcatcggacgggtgtagtcgtagggcattccctcggtccgtccggcgttgaaatatttgagtgcgaagccgaagagcatcgggaaaaggcacagtccgatgttctgaatccagaatatcagcgaataggcggaacccagatagcgcgtctccacgatcttcggaaccgagggccagagtgcggccggaaccagcgagaacgagatgccgagcaggacgatcgagccgtaggcgacgggcttgctcgggaactccgggagcacgaaggcgaaggtcaggtggcagacgatcatcagaatggcgcctaaaatgagcatcgtggcgcccttgcccttgtggtcgaggtatcggcccaggaagggggtgatggccgccgcgcccatcgggaaccagcggaaaatgtcggctgcggtctgggccgatacgccgaggttgctctccagcatgttggtggcgaagcgctggaaggggaagatggccgaatagtagagcacgcagaggaacgcgatgatccagaacaccttgctgctcaagatgtacttcaggtcgctgaccttgaactcctcctcgctgccgcctccgccccggctgtcgagacccagttgtttgtccagtttgcggtccatgaaggagaagatcacgaacgtcagcaggccgatcagcagcagcacggtgcagaatgccaccggtcgtacgaccgttgcgggagccatgtcggcgagccacggcgaaatggagaagatggcgaaaacgccgacgcgggcaatggccatctcaagtcccatggccagagccatctccttgccttcgaaccacttggctatggcttttgatacggtgatgccggccatctccatgccgcagccgaagatcataaagcccagcgacgccagtttggccgaggcggggaacgaggtccaccacgagccgagccacgtttcgatgcccgaacccgcgaacgagtcgctcacggcgtagtatttcagacaggcgccgatgaacatcagcgaagccgacagttggccggtgaaccgcacgcccatcttgtcgaggatgatgcctgcgaggatcagaaatccgaagacgttgagtatgaactccgaactgccgtacatgccgaatacgtcgggggtccatccgcgctgtgcctcgatcatgctttgcagcggcgacatcaggtcgacgaacatgtaaccgaaaaacatcgtggacgcgatgagcaacaacgccgtccatcgggctgcggacgagtcgttgagtttacgttggatagtttctgccatatttttttgtgttgagttagttatccagtgatgcgtagcgtttcagcacctcgtaggcttcggtgattcccagttcgccggctttcgagaggtcgaggcagcccttgcgggtgtctttcataaacagctggatgatgccgcggttgtagtaggcctcggcgaatgcggggttgagtgagatggctttggtgtagtcctcgaacgcctcgggcaggctgcccgagagggccagcaggttggcgcggttgtagtaggcgtaggcgaagtcggggaagagcttcacggccttgttcaggtcggccaccgcctcgtcgtagctgtacgtgcgtttcgaattgttgttcagtcggttggcggggtccgagtcgatcgtgatccgctggtaggagttgtcgatcgacgagatgaagtcgatcatctcggcgcgcgtcgtcgagcggttcaggtagaggaacgggttcgacgggttcaactcgatggccgacgaataggtgctcaccgaattggtgtactgcttgatgagcgactgcgtgacggcgcgttcgaagagcacggtccatgcggggttgcttgcgttaagctcctgcacatactgcttgtcgagcatcaccagcgtgtcgggcgcgatgttgctctcgcggcacgagagggtgaggtattcgttgccgatgcgcttcttgaaatcgtcgacgcgttgcaggtgatagggtttggctgcgggaaccgagtcggggcgcatgagcgtgaacttgaacagcggcagcaggcgcatctcctcgtgtccgccgttgtggcccgtgatgcggtcgaagctgcctccggcgaacttgctgtcgaacgacagcaggcggtcgaagcgctgcgtggtgtcggcgtagatcgaataggtgctgtcgttcaggcgcgaacggtattcggcgattttccgctgggcgatcgagcggtcctctttggcgccctgcgggtcgcggagcagttcgcgcagccggccgcggtaaatgtaggcgttggcgaagtcggggtatagcttgatggccgaggtgtagtcctccacggcgcgctcgatctcgcccagctgggcgtagacgcctgcgcggttgtagtagaccagcacgttgttgggcgagtagagcgccactttgtcgtaatcctccagcgcgcggttgtagtcgccgatctgcgtgcgcagcatcgcgcggttgaaataggtcagcgagttggtcgaatcgagctggatcaccttgtcgaaatcggccagcgcctgcatcgggcggttggtggcgttgtagaccagcgcgcggttgaagtaggagagcaggtaggccgaatcgcactcgatggccttgttgaaatccgcctcggcctccttgtactgttcctgctggaggtgcagtccgccgcggcggttgtagccgttgggattctcgcggttggtgcgtatcgcggtgttgaaattctcgtaggcgcgcgtggtgtctttcaggtggaggtagctcaatccccggcagatgaaggcgtcggccaccttgttctcctggcggatgaacttgtcgaaatcgtcgatggcctccttgaactgctggttcagcaggcgcgtcacgccgcggctgtaataggggcccggcaggtcggggcgcagctcgatcgcctcgcggaagtcctgcaaagcgtcgtcgtagttgcccagacgcgagcgcgtgatggcgcggtaggtgtaggcctgcgtgtagacgggattgagccggatggccgtcgagaaatcgtcctcggcgcccagcaggtcgtcgaggttgtatttggcgatgccgcgcaggaagtagccttcgaaagcgtcctcgtcgaagcgcagcagggtgttcagcgtgcggatggcctcctggtagtcgttgttcatcatgcacgaacgtccgacccagaaaaaatattcccggttgtactgtgcgtgggctttcgtgccgcacagcagggcggttcccaatatgattccggcgatgagtttccgcatgctgactgattttgctctttaaacgggctttccgtgcgatttattattcctgttcgtatccgaacctgcgtaattgccgttcgttgttgcgccagtcgtcgctgaccttgacgaacaactggaggaaaaccttcttgccgaggaactgttccatgtcttcgcgcgccgtctgtccgaccctcttcagcttctcgcccttgtggccgatcaggatgcccttctgcgagtcgcgggccacgtagatcgtcgccgcgatgcggtcgatcgtcggctcctccttgtaactttcgatctcgatttcgcagcagtaggggatctccttgtcgtagaatttgaggatcttctcgcggatgatctccgaggcgaagaagcgcagcgtcttgtccgtaagcgtatccttggggtagaacgccgggccttcgggcagcagcgagaggatggtccggaacagcccttcgatgttgaaattctccttggccgacgtggggacgacctgcgccccggggatttcggcctgccatttgtcgaccagcgcttcgagcgcttcgggcgtcgagaggtcgatcttgttgatgaccacgacggtcggaatgccgctccggcggatgctgtcgacgatttcggccgagcgttcgctctgctccacggtgtccgtgacgtagaggatcacgtcggcgtcggtcagggcgcccgtcacgaacttcatcatcgactcctgcaacttgtacgagggcttcaggatgccgggcgtgtcggagtagacgatctggaaatcctcgcccgagacgatgcccatgatgcggtggcgtgtggtctgcgccttggaggtgatgatcgagagtttttcgcccacgagggcgttcatcagcgtcgatttgcccacgttgggattgccgatgatatttacgaagccggaacggtgcattttttttgctttattcgcagacaaaggtagggatttattcgaatttatcctatatttgttttacaatatgctaaaatcgcactgcctatgaaaaaatgagaacttttgattcttaatgccgctacggcggcacacgacatataaaagcgcatcggcttttcttcttacattcagaacttggacacttttgaatcacagagaggaattaaagttgatgctcgcgctgttttacggcgcgggcattcctttcatctttctgtgcaggcagtccaaggccttgaatgtggatgaacagagtttgtccgcgttttttgtgttttgacatttgctcgatgtaaaactctaactccttgaatgatgaaacgttttaatttgcttgtgtatgtttaccggggcataaacacgctggaagaaaaattcacccggaagaaccatcccgattacacatccgatttgagtaagcatgtcctgatcgtgacgggtgtatttatcggagcgacattaattacctcgctgctgggggtgtagttatgagcatgcggcacggaaatttctctcctaatttgtcggtcggcatgggcataggtctgttttttctttcaacgactccgtttctgtgttgtgtcgcctactggatctattatttgaaacggcatttgtatttgttctcgacgaccggtcagaaaatcggatatggactgttcacttgtgtgatgcttgctattctgggaccgtctattttcccgctgcttatagctcttattttgctgtccattgccatttcgatcgctttgttcctgttgagtgtcgtgatgacgatcattgccttgttcgacggaggaggttcgaaaaagaggcggttttcgctcgacaatggcgatgaggtgaccgaaaaatcgggattgttcggcgaaaaatattatgaaggccggagcggaaaatcctatgaaaccaacgataacggcaggacgttctccgaaaagtagcattcctcaccgggtttcacatgactgcaaaaaggctctcgtttccgagagcctttttgcaatgaagtcttgtaaaatgtagcctatcgccgcatcattccgcccggcatcttgggcatcttcatgccgccgccggccacggccttcatcatcttgcgcgtgtcgtcgaactgttgctgcgcgccgcgatgtcggccccttcggctcgcaaccgccggccgtgggcctttatcgtggtggataacaaggccttgctacggcaactggccgactcgctgccttatgcgcagagcgccgctgcggctccgatggctgtcgtggtgtgcggtgcgctgaccgagtcgcagggtgcgaccaatgccgggtggtgggtacaggatgcggcggccgcttcggagaacttgctgctggcggcccatgccgtcgggctggggaggctgtctggacgggcgtgtattcctccgaggatcgcgtgcgtgccgtccgcaacgtgctggggcttccccgccgcgtcgtgccgctcaacgtgataccgatcggttatccagccgaaaatcccgctctcaagcagaagtgggaccctgcaaaggtccgctgcaacggctgggccgagtaaacggaatccctgtgcaaaccgcagggattctttgctattgagcttttatccattcgaaaacggggtcgactccttttttgaaatctgcgaaactcatctcgatcgacatgtcgggttcgatggtctcgatctctttttccgagcgtttgaagtattttgttgaataattgaccaaaaccttcgaactcggaagctgaaagctgcggacctccccgaaatggttgggctttccggccgtctcttctccgacgaaaacggcattggtcagctgtttgaaatccatggcgttcagaatcgccgaggagaatgtatcgcgtcccagcaccacatataccgcaacttgcgggtgttgtttgagggcttgtgcgagtcgttcgacaaattcggttccctgtgatgagttgccgcctccgttgtaacgcatgtcgaaaatgagtttgtccaccggtttatcattcagcgtttcgaatgctttccgggtaaacgcctcgaacgacggcagcttttgcgcagcttccgcgtcgccccgttcagccgccagctcacggctgtgacatttgttgtaaagcatgtaatagatccgatcttcggggaaataacggctggtgaagaggactttgcggttggcggttgcgaaagcgagggagtcgggtctgaaatttacgaatgcattgtcgggatgtatcggctttaccacctgcgtctttccgtccgacagcataagcttgacttgccgggagtcggcaaatccgaagtgttcgagagcttgaaggctcatcaccgtttccgggacgattgacttcacgatcgcctggttgtcgatggtgaaaagagtgctcaaactgtcgatgaccgtcgcgatgggcgtgtcgttgatcgctacaatccgcagtcccaaaatttctttgttttccggggtcgttttcgtaatgtagagcccgtcgctgacccataatgtgccgagcggaagaatctgtgtctggtcaatcaactgaaagaattgcagcatggtgtgtgagtcgccgaagcgggcgatcagctgttgcgttttgagggcgacctgaaaatcagtcagtcgctccgactctgctttaatagcctcgattcccgatacaaactcccctttgctgcgggccgtaaaaaagttgcaatgcttttcgggcagctccttggtcagaaattccagatcggctttccagtcgattttccccgattgtgcaaatgccgcctgcatgcacgtgcagagcaacagcaagaggagtttcttcatggtttatacgttttctttcggtgaaggtgacgatttttctgtgatcttgcgtaatgtgctatttgagacgtccgcatgtaaacaaatcaggcaagccttggagcctgcccgatccttatataatactatcgccgcatcatcccgcccggcatcttgggcatcttcatgccgccgccggccacggccttcatcatcttgcgcgtgtcgtcgaactgcttcatcaggcggttgacgtcggccatcgtcgtacccgaacctttggcgatgcgttcgcgccggcgggcgttgatgatctcgggatgctcgcgctcggcgggggtcatcgacgagatgatcgcctcggtctgcttgaacacatcgtccggaatgtccacgttcttgagcatcttgcccatgccggggagcatcgacgcgaggtccttgaggttgcccatcttcttgatctgctgaatctgcgagatgaagtcgttgaagttgaactggtttttgaccagtttctttttgagcttgcgggcctcctcctcgtcgaattgctcctgcgcgcgttccacgagcgacaccacgtcgcccatgcccaggattcggtcggccatgcgctcggggtggaacacctgcaaggcgtccatcttctcgccgctcgaaatgaacttgaggggcttgttgaccaccgaacggatcgaaatggccgcaccgccgcgggtgtcgccgtcgagcttggtgaggaccacgccgtcgaagtccagccgttcgttgaactcccgggcggtgttcactgcgtcctgacccgtcatggcgtcgacgacgaacagcgtctccgaaggtttcacggcggccttgatggccgtgatctcctgcatcatcgcctcgtccacggccagacggcccgcggtgtcgacgatcaccacgttgtaattcttctgccgggcgtacttgataccgttctcggcgatctcgacaggattcctgttaccctcctcggtgtagacctccacgccgatctgtccgccgagcactttcagctggtcgatggctgcgggacggtaaacgtcgcctgccaccagcagcacctggcggcccttcttcgacttgagcagcgaagccagcttgcccgagaaggtcgtcttacccgaaccttgcagacccgcgatcagaatcaccgcaggcgtgccctccagccggatgtccgtggccgtgccgcccatcagttcggccagctcgtcgcggacgatcttggtcatcatctgtcccggcttgacggctttgagcacgtcctggcccagggctttctgcttcacttcgtcggtaaaggtcttggcgaccttgtagttgacgtcggcgtcgatcagcgcgcggcggatctccttgagcgtctccgcgacgttgatctcggtgatgcgcccctcgcctttgagaattttgaacgaccgttcgagtttatctgttaaattttcaaacatgacttctgaaattatccgagcgcaaagataatcaataattcacaaagcacaatccgccgtggaaattttgttatgccgtgaaaaatagttatgtttacaactgaacctaaccgtcatgcaatgaagaaatttcttttcctgctgcttgccgtcacggccgggaccgctccggcgcaaaccctcgtctatcccggcgagcacgaaatgccacccgtcccgaagaccttcgacaacgaactgggcgtgcgctacggagcgcagctttacgtgggcgacgggcggggacccgaattgcaggccttttcgatcgactatgcccgttataatttttacaatatcggttttcgaacggggctgaacgtcttcgtcgacgaggatgccgagaactatttctccgtgccgctgcaattcacctggcggaccggacgtatcgcctcgtcctggcgccgggagagccgggagcggagtgtgcagaataattactacaacggctcttatgcagatccttacggcgcttattccggcggaggggcggacgtgggcagtacgtttctcaacgtgctgcttgcgatcctgccctcggggttcgaggtccatgcgggctttaccccggggctgatgtgcgggccgttcacgaccgaaggctattcgacgaccgacccttcgtggcggccctataccgtccggcagcgtttctcctgtacgttcgacgcgggtgcgcggctgatcatcccgatctggcggttcaacctcttcggcgacttcacctatcactgctacctgaccgataatttccgggccggggagtttcggccttcgcgctcctatatggggctgggtgtggggctgtcgttcaatttttaggagcgggattccggaacggtccctccgttacccggtccctccgttacccggtccgtccgtcgctaccggagcagtccggcttcgtaataaatcacgatttgctcgatcatccggtcctcgccctccctgtcgtattccgacttgaggttctgaccgaagattttcgagacgccctgccagaatcccgccacgaaaccgccgcggaactccttcaacacctcgtaggcggtgtattcggtttcgcggtcgatgagtttcagcagcacgcggccctgcgtgcgggtcatgtgtttcagcacgggggtgtattcgtccttgatctcgtggtagatttgtttgatatactccttctgggcctttttggtcggcaggcggcacaactcctcctccatcgtcgccatcttggccttggcgatctgcgcgatggggtagacctttttcacggcgtccaccagccggcggtagcggcgcaggtcgaccgggcggctgaagacgtagaccggcaggacgtggaccagcgggatcgaatcgcccttctcgaccgtccactcctgatgccagaagccacggcctccctgcgcctgcgcttgggaaagcgcggcggcgagcagggcgatgaggagtatccactttttcaacggcggcgaattttttgtacctttgcggcggagtccggatgaaaacccgtgcggttttgcatccggtttgccggggtgtctccggcaaagataacgattcaccgcgataaacgaattacgaacagcgaatattatgcttgaaaaaggactttccgcccgcagcgccgcaaccgtcgccgccggcaacacggccgccgcgatgggttcgggcgaccttgcggttttcgccacccccgcgatggtggcgctgatggagaacgccgccatgacggccgttgccggcgaacttcccgaaggcgcgaccaccgtcggcgccgagatgaacgtcacgcacatcaagccgtcgggacttggcgccgaaatcaccgccacggccgtgcttgccgaagtcgaggggcgcaaactgaccttcaacgtcggggcccgcgacgccgaggggctgatcggcgagggcatccatgtccgctacatcgtcgaccgggaaaaattcatggccaaggtgaagtaatggaaaagctccggatcttctgcgtctgcgaaaagacgtacagcttgatttgtagttatttatgccggatcgaaggattgggctctgtgtttggacagggctcgatccttttcgtttgtgtacaattctgttcaagtcgcccgatacctgtaaatttctgtgcttatactacttaatcttgctgaattattggcggttgaatttgcataattgattatttttcgttatttttgctctacatccattacaactacatattgtaattatccgtaagactctcgcgaacctgccttcaatgtttcatccttaaacttcaaactatgaaaactcgcattttgactttgacagcagccctgcttctactgggtgggtttgtcgcatgcaacgactcggaagaatccgaatatatcggcactcctcccgtcacagcctccgcggacgtatcggcttttttcaagacctatctgccttcgagttccagttcgcatcccgagccggaattcaatttcagcgagatcgatgatcgcgacatcgaatgttttgtgatcaacagcatggaagagttcgaggccgttgcacctccttcggtcgagctgccggtaatcgactttgacaaatatacccttattattggacagcattggatggggcatcccggatactctttcgagaagcaggtcgtcgataccgaatccgataagatgacattgaatttggtgtataagcaactgaagggtgggactccggcgattatgactattttttatttctggggactatacgacaaacttcccgaaaaaacgcttactgtcaacaaaatcataatttagatattcttatatcatgaaaaagctgctttctcttatcattgcagtcataacattttatggttgccaggatgacattttgtcagaggaatatcaagaaaacgttcccgcgacccgtgcgtctgtgggttcgtctgattattattattatttggtgtgacggtgtgaaaatcccactaacggtcaacgagaacaagtcgtatgttttggttgaaaccgcaaaatttgaaagtgttcgcaaatcggccgtaaatatccgtgggggaaataccagaactattgataactatgctgcgctgggcataagatcgtcaaaagagttccgcatgcaaaaaagtcttacgtcgtttacgctggataacgcccaacaaaaatcgattaacccgcaggatgtagtgtatgaggctccctattttaaaacaagcgatggagccgatctcggcataacgaatgtattcagcgtacaactgacaggagagcaagaccttgccaaacttcaaaaaatcgcggaagagtataatctggagatattgggagaaaacaaattcgacccgagtatctattatctttcgtgtacaaaggagtcgaaagggaatgcgctcgaaatggcgaattttatgtatgaatcgggcgcgtttgagtatgcaacacccgagtttatcgttgagtcgatgtccgacgccgctccgaacgatacctatttcagctatcaatggaatctgaaaaacgtctcttatccggggatcgatatcaattatgtgaacgcaaggaatgcctttgcttttccatatatcaacgatattatcgttgcggttgtcgataacggtgtttataataaccatgatgatttacatttgtataatgtcagttacaacgctcacacgggaggaattccaagtgggctatacggagatcacggcacaaaggttgccggtgttatcggagccacggctaataatggcaaaggcattgcaggcgttgcatccggagtgaaaatcatgcccatcagtatttgttatactgataacgagcttggcatagctgcctccaccacgaccaattttgcgaatgcaattcggtttgccgcaaataatggtgcgcgcgtaattaataattcatggtcatttgatacatcttctccaatatccgaaatcaataatgctataacatatgctcatggtaaaggatgcatcgttgttttttcatcgggcaataaaggcagtgctgtatcacagccggcagcgggagcaccttctgcaacgttagtagtaggtgcaatagatcggaatgggtacaaatcggatttctccggttatggttcttcattggatgttgtcgctcccgggcgtgaaatctggacaacagatgtgaccggtggatatacttgtgtgtcgggcacatcttttgctgctccccatgtttccggcatcgtggctttgatatgggcaacggatcccgatctttcggtatggcgggtacgcaatattatcgaacaaactacccgaaagatcggcggcaacacttatggtgtcgatccgcttcgattgaacggattatggaaccaatttgtgggttatggtctggtaaatgcctatgcagctgtatcagcggtttcggggcccgctcccaccgctccaaacatcgggacttcattgtcggaggtggaacccggcgatctttcgatgatgggtttggggtatgataaatggaatatagcgtatttggcccgtggagaagggcaagcaacgtgttctattgaaaattacgattcttctgtcacttatgtatggagcagcaccctgcctccgtacacgggtgagggcttcacatttaccgttgattttgcgtcggataccgatgaacccgtacttcacgatatcgaatgtcgggtgttgaaaaatggtctatccacatcttccggggtacatctggcattgattccgcaagggtactcttactaaattgatattggagttcctgacttacaaactgctgataatttggctgtaaatcagaggttggataaaaatattttatccaacctctgattatactgttatgaggcaaacccgtgatcggcaatattctgggcgcacgacgcatccggaacttttcggtcaaagcccgatcaggacgtgttcgagccagatcaccgcgatgcccgccagatagccggacagggccagcagcgagatgcgtttgaggtaccagccgaaattgatcttttcgagtcccatcgccacgacgccggccgccgagccgatgatcagcagactgccgcccacgccggcgcagtaggtcagcaggtgccagaacagcccgtccgccacgaaactctgtgcgaaagccgggtcggcgctcgccgcagccgttgcgacgtcggccaccgggtacatgcccatgcaggccgccaccagcggcacgttgtccaccaccgacgagaggatgccgatggcgcccgcgatggtgaacacttcgtggacattcttgtccagccagtcggccatgtcggtcagcacgccgccggtctgcaacgcgcccacggccatcaggatgccgaggaaaaagagaatcgtcggcatgtcgatgtgcttgaggactttggatacgcgcggctggatcgactcctccatgttgcggatgctgcgtttgcggtcgtagatgatttcggtcagaatccacatgaatcccagcgacaccatcatgcccatgtagggcggcagtccggtgaggctcttgaacaccggcacgaacagcagacttacgacgcccacgataaggatgaatagccgcaggcgcggaccgatgcattcggggcatcccgatgcgagggccttggcgctgaccgcggcggcggggcggtcggcgacgtagcggctggcgatggccgcagggatcacgaccgacacgaggcacggcaggaagaggttggcgatcaggttggcggccgtgacgttgccgcgcatccacagcatgatggtcgtcacgtcgccgatgggcgaccaggcgccgccgctgttcgcggcgatgacgatcacgctggcgaaaatccaccgttccttcttgttggcgatcaaccgccgcagcagcatgaccatgatgatcgtggtggtcatgttgtccagtgcggccgacatgaagaaggtgatgatcgccagcagccacatcagtttgcgcttgttgcgcgtggtgatgtggtcggtgatgacgttgaagccgccgtagctgtcgatcaggtccacgatggtcatggccccgatcaggaagaccaggatttcgcacgtgtcgcccagctggtccaccagctcgtgctgaatgtgcgggtcgttgcccaggaggctgaacacggtccagatcgctccggccatcagcagggcgacggccgatttgtcgatcctggttttgtgctccagcgcgatgaacagatagcccaccacgaagagcagaatcattgtcggaatcatatcgtttgcgtttatttacagggtaactgaagcaaagatacgaaaaatccggcagaggtccggttttgtctctgccaattttgcatccgggggttggtttttgcgattttttgtttatctttgcagtcgctttcgagcgaatgtttgagctgtggtgtaatggtaacacagcagattttggttctgtcgttctgggttcgaatcccggcagctcaacacgaaaaggcggtcatgcgaccgcctttttcgtgcatacgtttgtttagcggatcttgcggtgtgagatgagcgcggcgatccacagcaggatgaccgagccgatgacggccgtcgccagactgcccagcgtgccgacgggaacccatccgaagagcgaaaagagccagccgcccagtacgcctccgataagcccgacgatcaggttgacgaagagtcccgaacctcctcccttgacgatcaggttggcgatccatccggcggccagtccgatcagcagataccatagaaaatacatagtcttgcattttggaacgcttttcggagtgcaaaatccgtacccggccgggccggggcgttttataacgcctttttcagcgcttttgccagctgatcgggacacgacgtgccgcggccccggcagtcgatgccttcgagccgggcgacggcttccgctgccgtcatcccgcgcacgagcgccgcgattccctgctggttgccgtggcagccgcccgtgaaggagacgcttcggacgacgccgttttcgagttcgacgtcgatttgccgggagcaggttccctggcagacgtgtgttattttctgtgtcatggagttacgattttccggtttgcgggggcgaagatacgaaattcggagcctttcacaaaatgttgaaaacttcctgctccggaattttgaaagtcggggaataatggagacttttgtgacccgcaaaggtatccttcgtcccgccggggcggaggataagagggaatcgggtgcgaatcccggacagttcccgctgctgtatgcacttcaatgccgcaggcgaatcgtcgagccactgtcccgctggggacgggaaggccgcctgcgggtcggtgcgagtcagaagacctgcctttgcgcatgcaatgtcggccctgcggggaaacggggcctgttgtgaaacgtatatactcatattacaatggattacacgcagatttccatcatcaaacgtgatggtaaaaccgagcctttttctctggataaaatcgtccgcgccatcacgaaggcctttcgcgcgggcggcataacggacgaggggcaggccgtcgagcagatcgcatccgacgtggcggcggcaattacgaaggccgagatttcggtcgaggagattcaggacatggtcgaggagcggctgatgaaacgcaacccctcgatcgccaaacgttatatcatctaccgcgagtggcgcaacgtcgaacgcgaccgccgctcgtcgatcaagagcgtcatggacggcatcgtgaccgtcgagaagaacgacatcaacctttcgaacgccaacatgtcgtcgcacacgcccgcggggcagatgatgaccttcgcctcggagatcaccaaggactacgccctgaaatatctggtgggcgtgcgtcacggccgcgcccaccgcgacggggacatccacattcacgacctggactactatcccacgaagaccacgacgtgcattcagtacgatctgggtgacatctacgaacggggattctcgacgaagaacggctcggtgcgcacgccgcagtcgatccagagctacgccacgctggccacgatcgtcttccagaccaaccagaacgagcagcacggcgggcagtcgatcccggcgttcgaccatttcatggccccgggcgtgctgaaaaccttccgccgtcacctgaccgacatgacgctgttcctgtgcggcgtgcggggcggcgtgacgctggagcgcgccgagctgaaggccctggtcgccgaacacgtgccgacgatcgaaccctgcgagacggcggtggggcgtctgttcgccgccctgcgccagtcgggcgtggaggtcgccgatgaggacatccgacgcatctggcggcaggcctacgacacgacacgccgcgagacccatcaggcgatggagggattcatccacaacctcaatacgatgcactcgcgcggcggcaaccaggtggtgttcagctcggtgaactacggcacggacttttcgcccgagggccgcatggtcatccgcgaactgctttccgccacgatcgaggggctggggcacggcgaagtgccggtcttcccgatccagattttcaaggtcaaggagggcgtttcgtggtccgaagaggactatgccgcagcggtgaaggacttcgacaaggcgctggccggggagatcaagttcaaaactccgaactttgacctgctgatcgaggcgtgccgcaccacgtcggtggcgctgttccccaacttcatgtttctcgacgcaccgttcaaccgccacgagaagtggcgcatcgacgaccccgaccgcttccgctacgaggtggcgacgatggggtgccgtacgcgcgtcttcgagaatctgcacggcgaaaagtcgtcgtgggggcgcggcaacctctccttcacgtcgatgaacctgccgcggctggccatcgaggcgatgcgcgaggccggggacatgattcccgacggcaacaaacacgcgatccgcaaggaggcgcgcgaaattttcctcgaatcggtgcgcaagaccgccacgatgatggccgagcagctctacgaacgttactgcttccagcgcacggccctcgcgcggcagttcccgtttatgatgtcgaacgatgtctggaagggcggcggccggttgcagcccaacgacgaggtgggcgacgtgctcaagcacggcacgctgggcatcggcttcatcggcggacacaacgcgatggtggcgatttacggcgaaggccatgcgacctcgaaggaggcgtggcagacgctctacgacgccgtgacggtgatgaaccgcgtggtcgaggagtacaaggccaaatacgggctgaactattcggtgctggcgaccccggccgaggggctgagcgggcgcttcacgcgcatggaccgcaagcgttacggggagattccgggcgtcaccgaccgcgactactacgtcaactcgttccatgtcgacgtgcgcgagccggtttccatcgtcgagaaaatccgcctcgaagcgccgttccacgccatcacgcgcggcgggcacatcacttacgtcgaactcgacggcgaggcccggaagaatcccgtggcgatcctcaagatcgtcaaggtaatgcaggacgaggggatcggctacggctcgatcaaccatccgatcgacacctgccgcaagtgcggccaccgcggggtgatctactcgaaatgtcccgtctgcggttcggacgacatcctgcgcatgcgccgcatcacgggttacctgacgggcagcctcgaatcgtggaactcggccaagcaggccgaggagcgtgaccgggtaaagcaccggtaatttcgattctcaccggcatcttttgcacttcccttgcggggcgaaacagttacatgcgttcgtatgctcctgcttcgccccacttcacgaagcccgaaaaccgctttgcgataatcgaaattggcggcccccctgtccgcccgcctaaaatcaaaattcacccggcggaagaaatcctttttgccgccgtctccggtcgcgtgcggcaagtccccgcctaaagtttagaggtggatcagatttgtaaacacggcgttccgccgtgaatcgagaccgacggtgttgtattcatgttatgaaaacgcaatggaattattaagaatcatcggcatctatcccgaaaccatctccgacggttacgggctgcgctatgcgatctatttcgcggggtgcgcgcaccgttgtcccggctgccacaaccccgagagccacgatccccggcggggcgagccgctgaccgtggagcgtgccgaaaccatctgcgctgcaatcgccgcgaatccgattctcgacggggtgacgctcagcggcggcgatccgctgttgcagcccgaagccatggcagcctttctgcggctggtgaaggagcgcaccgggcagaacgtctggtgctatacgggctatacgctcgaagagtgtctcgccgacccggcccgccgggagtgcttgcggtggatcgacacactggtcgacggacgctacgtcgaggcgctgcgcgatctgtcgctcgatttccgggggagttccaaccagcggatcatcgacgtcggggccttgcacctgttcggataggcgtatgaaaaaagagctgcaaatacttgcagctcttttttatgcgcgggttatctctactgacgctggaggtccgaattgtcggctacgaccatgtttttgtcgatgcgcagcgtcacattgccgtcgacctcgatcagcagggtggtctccttgatctccttcacgacgccgtagatgccgccggcggtgatgactttgtcgccttttttcagaccgttgcggaactcctgcatctgtttgcggcgcttggcctcgggacgccacatgaacaaccagagaaccagcaccatgaggccgatcataataatgaaactgtactgctgcatgaatcccggttgaggctctatggggaccgtctgaagaaaattaatcataattgtattcgttttaagtgtttattccattgaacgaagcaaaggtacaaattattgccgaataaacaaggatttattttatgtccgcttccacgaacagccgcaggggccgctgccctcccgccagcgtgatgtccagcgccttgagttgccagccccgttcgccgcgcgaatcgaaggtgagcgtcacctgccgtgcgtcgcccggtgcaatcggttgtgcgtcaaattcgagcgtcgtgcatccgcagctgcgccggtaggaggcgacggccacgggacggctcgcgtcgttggccagccagaggcgcagcacggcgatttcgccggacccgaggcgtccgaaacgcacggtgtctgtgcctcccgtggtgagaatcgagtccgttagcgagataatccggcccttgcgttcgaccgcacggggagacgtgccgcagccagcggcgagtgccgccagggcgaggatcgcgagcatgcgggtcatggccggcaggggtcagatcaggccgcgcccggcctttttgatgcgtccttccgcggtcagcgactcgacgatcttgtccagcacgccgttgatgaaggtgctgctgcccggggtggagtagtatttcgaaatttcgatccactcgtcgagcgtcaccttgacgggaaccgacgggaacgaagtcagctcggccatcgccgtgccgatgatcaggttgtccatgaagacgatgcgctccacgtcccagttggccgtgaacttctcgatgtagtcctggaaggcggagtagttgaccagcgacttttcgaacagcgtcttgacgaattcggggtcctcgctgcttttgaacttcgcgggaaccttcagttcggtgtgcgagacgcgcaggttcgaaagcgtgcgcaggaccatgatcacgatgtagggaaggtcgtcggtccagaggatcgacatctcctccagcacgtcgtccagcgcctcgcagctctgcaactccttgaagaagtcctcgagcagctttttgtcgtcgtcgaacgagcgctcctcgcgctgcatgtagtccttgtagtagtcgctctcggtcaactgcgcgtagagcgtgcggatcagttcgggatagcgttcccatcccagtttgcgggccgccacgtgatcgttcaccgcgtcgctgttggcgatggtgcggatcacggcgttgtccacgaacttggtgttggggttgaggtcttcgaatgtcggcagtttcttctgtttggccagctcctgacgctgttcggcgtaacgcgcgatctccacggggaggatcagtatctggaaatagaggtcataggccttgtcgacggacgccatcagcgttttttccgacgccatcatgttatccgcgcccgatttgagatgggcgaacagcgccttgacgacctttatacggagtaatcttctgctcaacatttttttagaacgatttttaacggccgcaaaaatacaactaaaaatcaagaataaaaaattaagccgggagaattctttctccgggcgatttccgcgcggccgtcgcggcggattccggcgtatccgaaaaaacgggaggcgcgatggcctcccgatgctgcaactacttttcccggatcgactttttcttgcctacatgactttgatagacacaataaacgattccggccacgagcaggacaaggatgcaatagccggtgcttcgggcgctggctttgagcatgctttcgagagacatttccggatagagaagcgcgaagacacaaagaaaatagatgaagcaggcgcccatgtttcgcaaggtgaggaaccgggaaatactcaaatcgtcgtctttcgtctcttttgcatcgggaaccggacacgtatcgggacgtttatccggaccctttctgattcggttccaaaaatagacggccgaaaagatcacgatgcttacgatcgtataaatgacgatgcaccgcacgaggcgtcccggagagcaatcttttccgggtgtgggcagaaacgctataatcatcagaacgacgtagaaattagccaatcctttgagaaacactttcagctcggttttgttcatggcagattcattttaaattccctcttcggcctcgcctccgaaataatagcaatggcgttttatattggtcctaatttaggacattggattttgaaataaaagaggcgaacggataaatagaaaaaaatatactgaattgcgaaagaaatatactctgccgaccgcctgcggggctctttgcatcctgatttttaatttttaattcttaatttttaatttgcttttgcctatctttgcacccgtatggaacaattggaagaaaaacagcctttcgacgtgatcgtcatcggggcgggcgctgcgggcatgatggccgcgggtacggcggcgcgcagcggcaggcgcgtgctgctgatcgaaaagatggagaagtcgggccgcaaggtccgcatcaccggcaagggacgatgcaacgtcaccaacgcgcgtccggccgaggaattcgccgatcaggtgcgcaccaacgccgaatttttcaaggtcgcgttctcggagttcaacaaccgggcggcgatcaagtttttcgaacgcgcaggcgtgaaactcgacatcgaacgcggcgaccgggtctttccgcagagcggcaaggcgtgggacatcgccaacgccctgctggagttctgcgtcgaaaacggcgtcaagatcatctacaatacgcgtgttacggagattctgaccctcggggaccgggtcttcggtgtgaaatacatcaaccggcgcggtttcgaacgcaaggaggagtgcgcgcaggtgatcctcgccacgggcggcgtctcctatcccgcgaccggatcgacgggcgacggctatgccttcgccgccgacctgggccatacgatcgagccgctgcgtccgtcgctgacgccgctcttgtcgtcgcacgcccagatgagatacctcgacaaggtgctgctgcgcaacgtgcgcgcgacgctctatgtcgataacgaacccgtgcgcgaggagttcggcgagatcggattttccgaccgcggcatcgagggcgccgtggcgctgcgcatgagccgcgacgcggtggacgccctgatcgaagagaagcgcgtgaagctggtcctcgacctgaaacccgcgctcacggaggaggtgctgcacgaacgcatcgcccgtgaaatcgccgagctgcaacccaacgagttcttcggcgaactgctgcgcaagctggttcccaagccgctggtgatgccgctggcgcaggaggtggacatccgtgcgaactgttacgtcggcaaaatcaccgaggaacagatcacgcgtctggtgcgtacgctcaagggactgactttcccgatcacggactatgcgccgttcgaatacgccgtggtgacggccggcggcgtgcgctgtgacgaagtgaatccctatacgatggagtcgctgaaagtcaaagggttgtattttgccggcgaggtgctcgacatcgacgccaatacgggcggttacaacctccagatcgccttttcgacgggccgcctggccgggtcgctgaaaaaatagacgttatgaagatcgtcggccatcccatttctttccggttgcccgggcgggtttccgaactgcgcaaccggctctcacgcgcccgttatttccgcggtcacggagtccattcgccgttcgtctacgacattgtgcgcagcgtcttcatgcgcgacgacctgctgccgggccgccgggacctgtacgaagccctgctcacggcgggcgtttcccgccgtcgggcggtgcagttgcagaatctgatgattcattgcggctatacgacctttggtctgaatcgtgcggatgctgaattctgcgtcgccacgtgcggcctgccgcgccctgcgacgctcgcgctggtgcgtgcggcggccgaagcggggcataccgtggcgctgatgtcgccctacgacggctgcgaacggcaagcgctgtgcgggcagattatcgcgggacacgcttcgacgacggtggataaccgcggttacctgctgattttcaacaaccatttgccgaaacaacatttcaggatatgaaggtatacacgaaaacgggcgacaagggaatgacctcgctgatcggcggcgagcgggtcttcaagaccgacgaacgggtcgaggcttacggtacggtcgacgaactggctgctttcacggctctgctggccgacaacatgcgcggcgacgctgcgttggcgtcgtcggtcggcgacctgaaccgcattctttcgcggctgatgtcggtcgaggcgctgctggccacggggcagtcggggagcgacaaggtcgctccgctggacccggagaccgttgcatggctcgaagggcgcatcgacgccatgcaggaggttctgaaaccgattgataaattcacgattccgggcggaaacgctgtggtgtcgatgtgccacgtgtgccgcaccgtctgccggcgcgccgaacgcgccgcgctccgtgccgacgccagatacggcgtcgactccacggcgctggtctggctgaaccggctttcggactatttctacctgctggggcgcaccctcacggcccattatgccgtcgacgaggtcctgtggattccctgacctggccgggtatgtaaaatgcgaagcggcacattccgggaatcgtgccgcttcgcattgatttattttgaggccgccggcctcaaaatcgctttttagtattcttcctcgttgaagaaatttatccatattgattatcaatacgttatgcatcaatcaatgaaatttgcacaaacaaaccgcaccgtctgagacggtctgaggcgatgggaggaaaaacggaaaaatcgcaaatcgtacaaccgtatcgcagaacttcataaaataaaaatgggaacattggaggcaggaaatcaccggcactgcaaaaagagacaacattcgatggaggaacatgaccattttcccgaataatgattgtatctttgaaaggtaaatatgtttaaacccgttggttgaattaaaataaagcatctttaacaagaccaattttacgatggttacagaagttgatgtattgcagcacggtcatagcagcgatttttgcggcagtacgtgtaaacagtccgcctgtctgctttgcataattgcgtaccatcatgaattggtcgttaagttgagagaaaacggtttcgattcgcttcctgaaacgcctgtaagcccacgaaggatttctc

SEQ ID NO: 43 - DNA, 129207 bp, Alistipes shahii
  source 1..129207: mol_type = genomic DNA
ataatactatatttggagggagcaacattactctctccacaatatagcatattattatcagaacattattatcacgagtttgattgattatctgtcagttatttggtgtattagcttatagctttggataataatttacttgtgataagaaaagttatcataactcgtgataacttctctgcaatgattgtcttcatatttttctgtcgttttgaattttacaaatgttacttcggatttagtggcggacaccggattacatcttcatgcccttattgtttttcttttgcggcttctcctgctgctgttgctgtgcggtgtccttcggggcggtctgtcccttccgcaacggctccttcaggttcttggtagcctcgttggtcttgccctcgctgttcaccgccacctgcgtgcggctctcgttggaaggcgcgaccttctgcgcgttatcggggttggtgtcgtagcggtacgggcgtcccttctccgggttgaacctgatgtacatcgtggcgtggaagccctgcttgtcggtcacgttctccagtttcacggctttgccagccacgtagtcggctttctgctgctcggtgaagtccacgccgctccatttgctgatggggcggatgctgccgtcggcgttcgtccacgtgttgcggcgttgctccttgttcgtgttggctgtgttttccgtaccctgcgcctgtccctgtgtggggttgttcttggcttcctgtgcttgtgcggcacgtggcgacctgccggttcccggcacgaactccacgccgcgctgctccacgttcacttgcagggtggtgacgaacttcctgccgtccttgcgctcgatgagtttgtcgcgcacaggcagcccggcacgcagcatgtcctgctcctgcttggtgatttccgtcttgccgatgcgctccggtatgcgcaccttgtttgccgggacatccgtgatttcgttcgtcttgcggtcgatgctgacgaacgaggggatgatctcgcccgtttccctgtccacgaggtccacaaccctgccgaggttgcccgtttcgcggaggttcttccggtcattgtcggagaatttgtgttccttgtactcatccagcttctgctccttgcggatgaagtgcggcacgaggctgatgtttccctcaccgtccttcttgaaggagaggcgggcgtccagctcgaatgattcgccgccgaaggtcggtttgacctttaccaagtcggacttgccatagttgagcatcttcgtaaggtcgccggacttttcaaggttgtcccgctttacgccccatctgtcctccagctcctgccagttgattttactctcgtcgatgggctggtagccacgtttgccctgcatctgttcggatttgtcctgttgctgttctttccgttgttccatgttctcctgtttttgaggttcttgtttctctgtctgttgtgctgccatctcttcctgcaccttcttctcatagtcggaggtgtccaccttgtgaggggcgagcagctccttgttcgcttcggggtctttcagcagttgcttcatcacctctaagagattttcagcttggtctgccgcaatgcggtagaaaccgaagcggctgggttccttgcactgccggaagaagttcttgaagaagttgtccagcacgtcgccatgtcggtcgaattgcaggaaactctgcgcgttctccgcttttgcgggggtgcgcttgggtgtgccgtccgcgttcagcccggctaccacgctgatctcgcctgtcttctcgtcacggactaccagcacgtccttttcgtcttttttctttgccatctgaaaaatgttttaatgggttatttatgaaagaaattatggatacgagccttgtagaaggctatatcttcctttttgaagtccttgatatggttggaaaggaatgtcagcacgtcctcctcgctgtaataggtcttcttgcccagcgtcttgtagggcaatgcgcctacgctgcggtagcgttggagggtgcgtttgcttatctggagcaacatgcacaaatcctgattgtcgaaaaggcggatgctttccgtgatagtgggctgtttcccctcagccttcatcgccagcagcagttcgtcctgacggtcgagccgttccatcagcttctgcatccagccctcgaagttgtttcgtgtgagcagttccatgacctatgtcctccttccttttggtttgccgcccgtgcgcagcgtgtggttgtggaacagggtgtctattgtcccttcctcgttccttactgtgttgtcctccaatagccgcagtatctcggaaaggcggtagcggcagcttccgcgtaccaccacatactcgatacggtggtcggtgcgcatacgctgcatggtgcgcttgctcacgttgagcatcttcgccgcctgtgccgtgtcaagcagcttgtcttcggtttcccgcttccgtttcttctcgtcccttgcctcgcggatgtaccctgcgatgttcgcaatctgcgccatcatctccttgtaggcggaactttccattgttatcactttcatgttcagtcctttctttttgtttctgcgacaaaattcggcaataaacaaaaggggctttaacaactcactacgtgactcacgtaagatttttgcggaagatggctccgtaacccggtcaaacggcgcaacaggcagcctttcagcggaaaacgatacgtcttgtatgccgtttcgttacctttgcggcaaactctaaatgacatgaatatggaaatagtatctatcgagaaaaagactttcgagatgatggtggcggcattcggcgcactctcggagaaggtcgccgccctgaggcgcaaaagcgacacggggcgcatggaaagatggctcacgggcgaggaggtctgcgggcagttgagaataagcccgcgcacgttgcagacgctgcgtgacaggcggcttatcggctactcgcagataaaccgcaggttctattacaagccagaggaggtgaagcggctgataccgcttgtcggcacgctctatccgcacggcagatgatttgatttattcacccactgaatccgaagttatgatgaacgagaacaacgatgtttttacgatggaagacgagccgatagcctctgtggtgcaggatatgcgcaaaggctcgaaatggctgtccgcatttctggaaagctaccgtcctccgctggacggggaacgttacctgacggacggcgaggtgtcggaactgctccgtgtgagccggcgcaccttgcaggaataccgcaacaaccgcgtgttgcccttcatacttttgggagggaaggtgctttacccggaaacggggctgcgcggggtactggaagcgaactaccgcaagccgctggagtgaggcggtttcatgaaaaagtaaacgggtgacaccttttgtggtgctacccgtttacttgtcttatggggtatgtgcaatcagcaatacccggcttttccgttctgtatgaacatcacgtatgtctgccgtttctcttgtgagagtgcctttcccaccagccatgtgcggaacaggtgggtgttgtaggtattcaccctgaaagcgaccgggatgatgatttcaagggcgtacacgtccgcgtgcagcccgttttcaagctgcatgtagcggcacacctcgtagtcgttcagcacgtccgacttgcggacggctctgatggcggcgttcactgccgggacggtcgtatggaacaatccggctatttcggtggcggtcatccacacgtcgttaccggttacgctgactgccttgtcctcgatgatgattgtgtcacgtttcatggcttttctttttagatggtgcaacctgcaaattcctcgacgccgttcaatcttgcggcaaggttctccatgtcctgattgagcttctctttggttatctttgcgtaaatctgcgtcgtctttatgctcttgtgtccgagcatggagctgaccgtttcgatgggaacaccgttggagaggaatatcgtcgtggctgccgtgtggcggctctgatgccacgtgatatgcttggtgatgccgcaacgcttggcgacggcacggataccggcaaggcacgtgttataatgcggaacgggaaatatcctgccgtccccgcacagtccccggtatttgccgattatgcggttggcgatgtcgagcaggcggatgttggacaccacgcccgttttctggcggttgatgtttatccactcgtgttcgtcgaagtaggtgcggatattctcttccgtaaggttgcgcatatccgcgaacgacagccccgtgaaggcgcagaacaggtagaggtcgcggtacaattcctgtttggcgtttttcagtttcccctccatcagcaggcggatctcatctttggtcaggaaactgcgtgttgtttcctccttcttgatttcatactcgcggaacgggtcgcgcgtcagccactcgttgttgatggcgatgaataccatcgtccgtaacgggcagacgtacagccacacggtattggtgcagcagtgcttgtccgtgcgcaggaacatctcgaagtcggagatgaaagccggggtaagctcttttagggcgatgtccttcacatggtagcggatgtcgaggaactcttgcatgtgcttgtaaacggtgcggtacttcagcagcgtgcctttggctttcatgcctgcctccacctgcttctcgtagtcctcgttgtgctggcggaacacctgcatcagcgtgtggtagcggtgttccagtccgagaaaggcgttcttcaccttctccgccgtgacgaagttgtcacgctccatgatttcctgataatgcctgttgatgcgtacccgcatcttgtcaagcatacggttcgtttcgagtgccgccgtgcttctgcccgtgacacgtccacctttggtgtcccacagtttcggatcgacagtcagtttgcagctgaactgtgtctggctgccgtccaccgtgatgcgtcccatgacgggaactgtcccgtcctttttcactacctgacgcttgaggtagtagattactgaaaatgtactcttcattgtccttaatttttgggtttcaaaattagttggtgaagagtccggtgttggtacgcaaaacggggaggaacggcgcaatctttttccgtaacctgatttttcgcatgagttatggataactcactattccttagagccttgtttcgctattcgtacccgtttgtcgcattttcgggcatggttacgaacaagtaacgtagcggcgtcaggatttggcttcggcagggattgtaatggcttcacggattatcgccacttcaaccaaaacccttgtaactcaattctatcactatatctttccgcatttcacttttttgtagtaactttgcgacctaaaactccaaaaaacgtcaccttttactgaatacccgacaggcgaagagagtttcgagaagaatgtcgccgatgttgccgtagataaggttttcaagttgcgaaccgatcgtttgattgaccgccagcagatacctatatatgacatggaggccgtcgctggtcttgttccgctgtttgcagaccaatacagccagtcgatcgtcgggtcatggagacgacactgatccccaaatgcgacggaggactgcgtatcgtaggggattcgatgtacccgctgctgaaaagcggagacatcgtgttttacaagcaggtacatgacatcatgcacagcattatatggggtgaaatgtatctgatttcgttcgacattgacggagacgagtacgtttcggtgaaatacctgcaaaaatccgatatacctgatcacatcgtgctggtcagctataacgagcaccacaaaccgatggagatacacatcaaccgcatccgggcgcttgcttttatcaaggcgtcgctgcgtctgaactcgctcaaataggggacagatcggtcattatactataaagcccgcacaaaccacgtttaaatggtcgtgcgggctcgtctttgtggtgaattaccactgaatattgcggttacgcattgaattggggcgtttcgccttgaaattcctgcactgaaattacggtaaattacgcagccaaaatttggccgttctatcctaactatctactttacaatcgtttcatctcttttatcccttttggagttttcgttctgccccttacagaaccatcccggctgacgcccgaaatcgtcgccagcctgggactcgctccggaggaggtcgcagccctgcacggtctggtcgaacgctgcaacgaggcggctttggcccggctccaggctgaatacgatgcgctgaaaagaccggcggcatcgttctctgacgtctccggtcggttccgcgcttctttcggacgcaaaaaaacaggatgccttttcagacatcctgttttctctttccgaccgcgggattatttcttctccgtgcgggtcatgcgcttctccttgatgcgggccttcttgccggtcaggtcgcgcaggtagtagatgcgtgcgcggcgtacgacaccgatcttgttgacctcgatcttgtcgatgtgaggcgagtagagggggaagatacgctccacgcccacgccgttcgaaatcttgcggatcgtgaacatcttggtcttgcccgagcctttgatctggataaccacaccgcggaagctctgcacgcgctccttgtttccctcgacgatcttgtaggagacggtgatcgtgtcaccggccttgaacgacggcacgtcggcgtccgtcttgggccacatctgctcgttgacgagcttgatgattgcgtctttgttcattgttgcaacaatttttgtgtttcgcattcgacattcccgctgcgccggggctaccatacaggtcctttgcctgtaatcccgcgaattggtttggctgcgtctgaagcattcgctttccgcccgccgtacccgtccgcatctgccgtagcgcccaatggaagaggttgatatacgcccgaaagggactgcaaatataggaagaattttccgaacggtgcaactattgcatgaaaaaagcgcgatattattcgtatctttgcgggaaaacgatttgaaagatgaatgaaagactgatactcgtaaccaacgacgacggatacgattcgaaaggcatggaggccgccatagaggtcgcccgggccttcggccgcgtggtggtcgtggctcccgagacgacgcagagcggcatgagccaggccatcacgatgtacaatccgctttacctgcgccgcatccgcgaggaggagggcgtcgtggtttacgcgttttcgggaacgccggtcgactgcgtcaaaatggccttcgactacctgctgcgcgacgagcgcgtggacatggtgatctcgggcgtgaaccacggctccaactcggccgtcaacgtcctctactccgggacgatgggcgccgccatcgaaggcagtttctacggctgtccggccgtcgggctgtcgctcgacgaccacggggccgacgccgatttcgccgctgcggtggtctacggccggcggatcgtcggcgacatcttcgccgcggaggtcgaactgccgctgtgcctgaacgtgaacgttccggtcggcagcgtcggggaactcaagggaatgaaactctgccgccagaaccgcggtttctggcgcgaagagttctaccgccacgaagacccccggggccgggagtatttctggctcacgggcgaattcgtcaacggcgagcctgaagccaccgacaccgacgaatgggcgctggccaacaagtacgtggcggtggttcccgtgcaggtcgatctgacggattaccgccagctgaagaatctgacgaaggtcttgaagtgaccggagaggggcgccggaccggaaaatcggcggagagcagtccgaaggcggcatttttaatgcttaattcttaatttttaattatttttgtcaaaaaatgtccgcctatgctgatcaagatcctgttagtcatagccatcgtcatccaatgcgtcgccacgggctatgccctgcggttggtgcgcaccaccaaatacaattcggtgtggattcttttcatcgtgggcttttcgctgctgtcggtcgaacgcctcatccagctgcttctcgtatcgggcttcgagatcattccccgctggtggttcggttatctggggatcgtgatctcggtctgcctgtcgatcggcgtgatgtacgcccacaagctgttcaaatacatcaaccgtctgaaccgtcagcggtcgctgctcaacaagcgtatcctcacggccgtgctccgcaccgaggagaaggcccggtcgcgtttctcgaaggagctgcacgacggtctcgggccgctgctctcttcggccaaaatgtcgcttacggccctcgcgcgtgaggagcacgacgccgagcagcgcgagatcatcgacaatacgacctatgtgatcgacgaggcgatccgctcgctgcgcgagatttcgaacaacctttcgccccacgtgctcaacgatttcgggctggcgcggggcgtgcagaacttcatcgacaagagcgctgcgatgcacgacgtgaagatccgtttcacgacgaacctccgttcggaacgttacgacaccgacatcgaggtgattctctatcgcgtgatctgcgaactgatcaacaactcgctcaagcacgccgcctgctcggcgatcaacctttcgctgtcgcagaacggctcggagctgacgctcgactataccgacaacggccgcgggttcaatccgcaggcgatgatggactgcggcatggggctttcgaacatcgcgtcgcgcatcaactcgctgggcggcacgttcgacatcgcctcggccaagggcaagggcatgcgcgccgccatccgcgtcaatacgcaggaggagcctgcgccgctgaaccgcaaccacaaccgcaaacgccgccgccgataatggaaccgtacaagatcatcctggtcgacgaccattcgcttttccgcaacggcctgcggggattgctcgaacgctgtgcggcgtgccgcgtggtcggcgaggcggccagcggcgaggagtttctggcgatgctcggcggcgtcgacgccgatgtcgtgttcatggatttcgccatgccggggctggacggggcgcagacgaccgagcgggcgctggcgcagcgtcccgacctcaaaatcatcacgctctcgatgttcggcgaggagagttactattcgcgcatggtcgaagccggagcgcggggctttttgctgaaggattccgacatcggcgacgtgatcgaggctgtcgagacggtggctgcgggcggcagctatttttcgccgcagctgctctcgtcgctcacgggacgcatgcgcacgcgggaagacgccgcggacgaacagctgtcgtcgcgcgaacgtgaaatcctggtggccgtctgccgggggctgtcgaatcaggagatcgccgacgaacttttcatctcgaagcgcacggtcgacaagcaccgcgccaacatcctcgaaaaaaccggctgcaagaacaccgcgtcgctggtggtctatgccatccgcaacggcatcgtcgacatttagggttcgattttatgcggcaatttccgcacatccctcacgcggggcgaacgggacgtacgtcggtactacctgtccgccccgcgtcttacgatgcacaaaacttgccggtctaaaatccccccccctccgccttttaggcgggattacagcagcggcgagaacacccgcatcagcgactccgcccagcggcgcggccgcgggcggttgaaccattctccgggcgtcagggcatgacagcgcgaggcgtcgtcttcgaataccccagccatgcgggccgtgaactctctgtcgtagacaaaggcgttgacctcgaaattgtgttcgaagctgcggaaatccatgttcgccgagccgatgacggtcagggagttgtcgatgatcagcagtttggagtgtaggaagccgggtttgtagaagagaatcttcaccccggccttcatcatgtcgtcgagataggagtgcgacgccaggtccacgaccttcgagtcggagcgcgccgggagcatcagccttacgtcgatgccggccagcgccgccacttgcagggccgagttcagcacgtcggacgggaggtagtagggggtctgtatccagattcgcttccgggcgttcgagacggcgtaactgtcggcctgcaacagtgcccgccacttgccgaacggtccgctcggcacgatctgcaggatgtcgtccgtatggcgttccgccgcggggtagtactccgcgcctgcgatgtgccgcttcgtggtcgccgaccagtcgctcaggaacgacgcctgcaaccccgccgcgccgctgccctcgatccggaagtgggtgtcgcgccacgatccccactccgtgccgcggacgtagcggtcggcgatgttcatgccgccgatgaagccgacgcagccgtcgatgacggctattttgcggtggttgcggtagttgaccttgctggtgaaaagcgggaacttgacgtgcaggaacgcgaacgcctcgattccctcgcggcgcatcccctcgaaaaaggactttttcacgccgctgcaccccacgtcgtcgtagaggatgcgcacctcgaccccttgccgggctttcgcgaccagcgcgtcgcgcaggcggcagcccgttgtgtcgtcgcagaagatgtaatactggatgtggatgtggtgcttcgcccgggcgatctccgcaagcagcgcctccatcttcgacttgccgtcggtgtagggcgtgatgcggctgccgtagagcggcacggagtggatcgtcgcggcgagcagccgggccagcgggaggtgctcgtccgggatgtcgggccgtccgtcgtcgagagcctcttcgagctgcatggtgatgcgtttgcgcgtgcggcgcgagatgatgcgctgcttggagaggttctgcccgaagaaaaagtagaagaccagccccacgaccggggcgaacaccagcacgatgatccacggcagggtcttcagcgggttccggttgtcggtgatgatgaccaggacgatgccgaggatcgtgaccgtgtagattacaagaaaggcatatgtcagtatctgctgcatatccgtcggtttcttctcatcgcgcggttgggcgttgcgcgccggaagcgggggttactgcctggggaaacgcaccgagtagagcaggtgttcgagtccccgcatgtagttgcgcttgcggggtttgttcagatcgggggcgtagacgtagcagtcgagcgtgaagacgcggttggtggccgtgtccacggtcgtatagctgacgaacgggcctcccatgaagtcgccgtgcacgtcccagaatccgcggagttcgcaccacaggcgtccctccatgcggaacaggcggtagtcgggggcgaaagcgtccgaagtgatcatgtacgaaccctccgccgggccgggaatctgcgccgcgtacttgttgcgtgcggctaccagcgcctcttccgtgagcgactgcttgccttcgtaggggtaggagtagatgaagaatccctgactggcggtcgggtattcgttgcgcgcccagatgaagtcgggtttctgtgcggccagcgtgtagcccttcggaaccttcatctccacgccgaacgttttgagaatggccgactcgatgccggggttgccataggtctcgttggccttcacggcgcggtcgcgttcggccttttcgagcgcatagacgaggttctcccggttttccgagaggtatttcaccagcgctccgtcgctggggccttgcagcgtcatcacgatctgcggatcggacgtcacgtcgtactgcacggcggtcgtggtctccttcagctccggatcgaccagaatcttgaggatgttgcgatgatcggcgaccatgcccgtgaagccgcgttcggtgacgcgcaacacgtcgaagatcggctcgatctggttcagatagggcaccggggcggtgaagatcgcgcgcagcgaatctccgacctcgcccgtccactccgcctggggacataccacgatcagttcgtagggttttccctgtgcactttttttcgaattgttcagggtcttgaaggcgtcgcagcctgctgccgtcgcgacgatcagcgctgcgatcgttatccggaaaagtgttttcatagtcggtcgattcgagttgtctttatcacaaatatacgtatatttttccaaatggcgcggaatttcactatttttgccgcgttatgcgtttgaaaccgccaaaaatagtccggcgcctgatgccggacctgatctgggagatcgacgacgaggacggcgtgttcctgaccttcgacgacggtcccacgccgggcgtcacggagtggattctttcgacgctggacaagtacgatgccaaagcgaccttcttcgtgctgggcaagaacgtcgagatgtatcccgacctctacaagcgcattctcgacgccgggcacaaggtgggcaaccacacctattcgcaccagaagggatggggcatgagcctcgaacgctatacggaggatgttgatttcgccaacgatctgatccacagcgaactgtttcgtccgccctatgcgcgcatcaccccggcgcaggcgcgtttcctgggccagcgttacaaactggtgatgtgggacatcatctcgcgcgactacaaccgccgcctgtcgccccgcacctgcctgaagaacgtcacgaaacacctcgcgccgggcgccatcgtggtgttccacgacagcgaaaaggccttccgcaacatgcgttacgcacttccccgtacgctggaaaagatccggcagatgggcctcaaatgcaaggcgatagagctttgaggccgttctgcgggcgtttgcagcgggccgtggccccgggaataggaatttccggatttttttcgtaacttcgcggcgcgaaaaaacaacaattataaaccatattcctatgacaattacagcagctgacatcaagatcggcatgtgtatcgaaatggacggcaagacgttccttgtggtcgatttccagcactgcaaaccgggcaaaggccctgccttcgtccgttcgaaactcaagaatctggaaaacggccgcgtgctggaaaacaccttctcgtcggtaagccagaagatcgagcaggtgcgcgtcgagcgccgtccttatcagttcacctacgaggatgatctgggagcgcatttcatgcacaccgagactttcgaggagatcaacatcgaccggaacctgatcaacaactacgacctgatcaccgacggtcagatcgtcgaggtgatgttccacaccgagaaggaggccgttctttcggccgaacttcctccgatcgtcgatatggaggtgatctacaccgagccgggcatcaagggcgacacggcgtcgaccaactcgctgaaacccgcgacggtgaattccgcgacggcgaaggacggcgccacgatccgtgtgccgctgttcatcaacacgggcgacaagatccgtgtcgacacccgcacccgtgagtactacgagcgcatcaaataggcggaagttacggcttcgaaaaaagggaggacgatgcagtcctccctttttcgtttccctcccctcttcgggtcactcgattgtcaggctgcgtcctttgggatatttcacggcgtagcgcaggcgcagttcgcgctgctcgccgggtttcagctccagtctccaggtgacgatgccgctctccttgtccagctggcctccgctcaactcctcggccgatacagcgatggcgctgttgcgcgatacgggcagctggtcggcgagcgtcagcacgacgggttccgggcgtgtgttgcgcacggagaacttccacgccacggtctgtgtctggttcgaaccgatggcgcggcgcgacgaatagtcgttctccttggtgcgttcgatgcggatgctccggtcgcggcccatcgagaagcggagtgtgtcgctcgtctgaccgggatcgaggatgctcttgccgacgaacgtgttttcgaaatagacgttcgcctcgccctgcaacaggttgagtctctcccagccggtggcctccgccacgaggaaggcgtccttgtcgatcttcggcgtgctctggtagatataggcggccggcaggtcgaacctcccgatttcggctgcgacgctcttgccgtctgaagggatggtgtagggctgtctgatttcgaactcgtagcccagctggctctgcgtctgctccacctccatcacggcgctctcggcgtcgaagtctgcaaaatcgacttccgccacctttctgtccgaagccgctgtgccgcgaatccggacacccggtgcggcgcctgccagttgattcgagacgccgtatcccatgacgaccacgtcgtccaccttcgtcgcatcctcctgcatcacgacgttcatcgtgttgcccgtgattcgctccgttcggggtatgtagccgacgtagctgaattgcaggctggaagcaccgttgggaacggtgatcgagtagctgcctcgggtgtcggtgacggcgccgatggtcgtgccgggaatcaggacggtcgctccgggcaggggtttgcgctgatggtcgaggactgttcccgacacggtgttgctcgtcatgttgaggttgtagcggggcgggacgagaccgtagtcgagccgccaggtctgcaatttcggggcgatgctcccggtattggggttcgacgaggagagcgtcaaggcgacgttcttccactcctctccggtgttctggaaaatattggccttgtaggagatctccaccggctccgacaacccgcccgaacggatgtcgtacgaggggaaccagccggcgttgcggacgtagtaggtcagcgtgaacgacgccttgcaggtcgcgggggcttcgatccgcacctccacttcgctcatcgggtccgactgtctgccgcccagattcaccagttcggccagaatctgccgtctgcgctcgttgattttctcttcttccgcgtcgagggagagcgtcttgcttttcagcgtttccagccgtgcggcatagtactcgttcaactccctgatggcggccagcggggtggcgacgttccggttggcgaccgagcagttcgttttcagcagttcgctctccgcatccatgacctcgcgcgaggccttcagccggtccagctgccgctgcgtctcttcgagcgtctgttcgagcgtcttttggcgggtcgagcgttcgaggctgtcggtgtggttgaaaagccggttgacggccgtcaccgtgaatggacctttggcgctgacctgcatgctcttgtcatccagatagggcgacagtccggtgaatacgaccgtcgaatttccggccggtaggtccacctgccgggtgcgcgtcacctgcgccccgtcgatgaacagggtcactttttcaacggaggtcttgactttctgcggtccggcgacggccgaaatagctgcggacaacgccagcagcaacagcatgcgtttcagattcattgctttgtcggtttgggttggttacagacaaagttagtcaattattccgaacggccaaacatccgcgcctgttgcccgcaccgcgcctgcatctcgccgccgcgtctgttgcctgtccgcgcctgcttttcgccgccgcgcctgttgtccgcccgcgccgcgcctactcgaactcctgcatcacgcgctccatcttgcggcggatctgggccgtgcagaggttgccgatgctgccttcgtgggtgtggcgcacctcgcgtgtgggcgtgtattcgcccctttggacggccatgcccacctgcttgtaggcttcgcggaagggcgtgcccgccagcaccatccggttgacgtcctccaccgtgaacagatagtcgtattttttgtcgtcgaggatgtgctcgttgacgcggatgtgcgcaagcatgaagtcgcacatcgcgagcgtgcgtttgatctccgtcgtcgccgggaagaggatgtccttcaacagttgcaggtcgcggtggtaacccacggggaggttggtcgtcagcagcgcgatctcgttgggaaccgattgcaggcggttgcagcgtccgcgcatgatctcgaagacgtcgggattcttcttgtggggcatgatgctcgacccggtggtcagctcgtcgggcagcgacacgaacccgaaattctggctcataaacagacatacgtccatcgccagccggccgatcgtcgcggccacggcggcgatggcggctgctgcggcgcgttcgctcttgccgcggctcatctgcgccgccacgacgttgtagtgcagctcctcgaagcccatcagacgggtggtcatcgtgcggtcgagcgggaacgacgagccgtatccggcggccgatcccagcggattctggttggcgatgtgccacgccgcggccaccagacgcatgtcgtccgcgagcgtctcggcataggccccgaaccacagcccgaacgacgagggcatggcgatctggaggtgggtgtaacccggcatcagcacctccttatacttttcgctctgctcctgcaaccggtcgaagaccctcttcacggcgtcggccacctgccgcagttcgtcgcgcaggaacagtttgaggtccacgaggacctgatcgttgcgcgaacgccccgagtgtattttcttgcccgcgtcgcccagccggcgggtgagcatcagctcgacctgcgaatgaacgtcctccgtgccgggttcgatctcgaaacgcccggcttcgatctccgcggcgatctctttcagccctgcggtgagtttttcgagttcttccgccgtcagcagtccgatggtctcgagcatggcgatatgcgccagcgacccttcgacgtcgtagcgcgccaggcgcatgtccagttcgcggtcgtcgcccacggtgtattcctcgatcattttgtccggctcgtagcctttatcccaaagttttccagccatattcctgtgctaattttccgatgtacttttcataaacggcgattccctccgcgatctcctcgaggaggacgaattcgtcggccgtgtgcgaccgcgacgattgtccgggacccatcttgagtgccgggaagggcatcagcgtacggtccgaagtggtcggcgaaacataggtttcgcgtcccgcggcgactgcggccttcaccagcggatgttccccgccgaccgccgcggcgcggatgcgcgtcgaccgcggcacggcctcggagcggagggccgcccgcaggatcccgaccgtctcctcgttcgagtaggcgtccgtggtgcggacatccacgacgaagcggcacgtgtcgggcacgacgttgtgctgcgtgcccgcctcgatctgcgtcaccgcaatgccgatgggtcctaacagttccgattcccgtccgaagcggaaagagcgcagccgcgcgatgtcgtccagcgcgatgtagagggcgttgaccccttcgccgcgcgccgcgtgaccgctccggccgtgcgccgtgcagtccaggacgaccagtcctcgttcgcctgttgcggcctgcatccccgtcggttcgcccaccagcgccatgtccactttccccagggcgggcagcagggcgcggatgccgttttcgcccatgcactcctcctcggccgagattcccagcacgaggttgaagggcagcggacgcgtgcggaacgtgagaaaagtctccaacagacataccaccgaagcccccgcgtcgttgcttcccagtccgtaaagttttccgtcctcgacggtgggcgcataggggtctcgcgtgtacgatgccgccgggcgcaccgtgtcgtggtgcgaattcaggagcagtgtcggtcgtgcggggtcgaacccctcggcccgtgcccagacattgttcgcaagccgttcgggcgccgctccgcgttgggcgaggaatgcgtggagcaggtctgccgtgcgtgcctcgtcgcgcgagcgggagggcgtcgcgatgagctgttttaagagttctacggcctctgtgatgcgtgcgtccaaattttgaattttaatagaattagctacattcgtgttgcaatcgactgcggttcggaacgacgccatcttcctccttgagggagggccggggtggggtcggatttgaatacgacgccgaaggcggcgagtacggcggctgacagcatccggggcatggatcaggcaattacgacatcgaactattctaattgtgaattatgaattccggatcaccgttccgattccgttcgacaggttttcggagcttcggatcgtcacgctccgcacccctttttcgacggctttcagggcgttttcgatcttggggatcatccctttgctcacgacgccgtcggccttgagcggcggataggttgcggccgtgatctcgcggatcagcgacgtgtcgtcgtccgggttgcgcagaaccccggctttctcgaagcagaaaaccaggtctgtcggggcgatttccgccgcgcccagcgctacggccgaagccacgctgtcggcgttgcagttcagcagggtccctttcccgtcgtgcatgatggccgagaagacgggcgccatgccgtcttcgagcagcctgcgcagcagcgcggagtccacccgttcgatgtcgcccacgaacccgtagtcgaccggctgggggctgcggcgccgggccgtgacggcgtttccgtcggcgcccgacagcccgagggcgttgcatcctgcggcctgcaatccggccaccgcctgcttgttgatcagcccggcgtaaaccatcgtcaccacgtcgagcgttcccttgtcggtgatgcggcgtccgtcgaccatctgcaccttcagctccagccgctcggccagccgcgtggccagttttccgcctccgtgcacgagtattttggggccttccagcgcggcgaactccttcaggaagcgtttcatcgccgcggggttgtcgatgacgttgccgcctatttttacgactgtgatccgttccatcagttcagaccctccagcagtcgtttgagtaccacctgggccgcgatctcgcggttcgcggcctcggggatcaccagcgaacggggcgattcgatcacctcgtccgtgacgatcatgttgcgccttacgggcaggcagtgcatgaagcgggcgttgttcgtgagcgccatcttctccgcatcgaccgtccatgcgcggtcgcgcgacagcaccttgccgtaattggggtccgtataggcggcccagttcttggcgtagacgaagtcggcgccttcgagggccttgcgctggtcgtattcgacgcgcgccgcgcccacgaacttcgggtccagttcgtacccttcggggtgggtgatgacgaaatcgtagtccgcggcgttcatccactcggcgaacgagttgggcacggcctgcggcagggcgttggggtgcggcgcccaggtcatcacgaccttcggacgctccacggccttgtgctcctcgatggtgatcaggtcggcgaaactctgcaacgggtggcgcgtcgcggcctccatcgagaagaccggacggcccgagtggcggatgaactgctccagcacgcgttcctcgtaatcctcggctttgtcctgaaaccgtgcgaacgatcttacgccgatcacgtcgcagtacgatcccatgaccggaatggcttcgagcaggtgttcggccttgtcgccatccatcaccacaccccgctgggtttcgagtttccacgccccctggttgacgtcgaggaccatgacgttcatgccgaggttcatggcggccttctgggtcgaaagccgcgtgcggaggcttgaattgaagaagagcatcaaaagggtcttgttgcgccccagtcccgtgaactggaagcggtcgcgcttgatctccaatgcttcggcgacagcctgacgaaggtcgccgatgtcttctacgcaggtgaatttatccatggattcgtttttttgttttttgttaaattatctggcttccatctcggaaggctgtctctggatcgtcctctaaaccccgccttttaggcaggcggcagctcgcgggggaatgctatgaagcaacgcgcaatagcaggccttcgcagggcggagctgcggcctgccggcgtaaaacgcctgttttatggggtccggagcaaaagtcggcctttttcacctttcacttttcacctttcaccttgtcgaacgccgtgaggaagcggtccgccatctcttttgtcaagcacagcgccggcagcagcctgacggtcgaagctcccgccccgcccgtgaagatgtgcttgtcgaaaagcagtttcttgcgcagctccggacccgatccgtcgatctctatgccgatcatcaggccgcgtccgcgcacctctttcagtccgccgatcttgtgcagttcggccagaaggtagtcgccgatctcggcggcgttttccaccagagcgtcgcgctcgatcacctccagcacggcgatggccgccgcacaggccaggtgactgccgccgaaggtggttcccaacagccccggacgcgcctcgaagtggggcgctatgagcacgccgccgatcgggaatccgttggccatgcctttggccgtggtgatcaggtcggggcggatgccggcggcctggtgggcgaagaagcggcccgtgcggccgtatcccgactggatttcgtcgagcaccagctgcgtcccggtctcggtcgccgcggcgcgcacggcgcgcaggaactcgtccgtcgggcagtggatgcccgcaacgccctgaatgccctcgacgatcaccgccgcgaactcccgcgtggcgagcttcgcgcgcatcgccccgatgtcgttcaggggggtgaactccacgttcggcgtgcggttgaagggcgacgagatcgccggattgtccgtcacggcgacggctcccgacgtgcggccgtggaaggccttcgagatggcgagcgccttcgaccggcccgtgtggaacgacgccagtttcagggcgttctcgttggcctcggcccccgagttgcagaggaaaaggcggtagtcgtcgtaacccgagatgcggcccagtctctccgccaacttcacctgaagcgaattctcgaccgagttggagtagaatccgagacgtgcgacctgctcctgcacggcccgcacgtagtcgggctgcgcatgcccgatcgagatcacggcatggccgccgtaaaggtcgaggtactcggttcccgccgcgtcgtagacgtagcagcccttgcccctcaccggttcgatcggatataacgaatatacgttgaaaagttccatatgtacaaatttacatttattgtcttaatcgcagtctttgaccgtgaaattctttgtactttttggccgcaaaaagtaccaaaagctctccgacggatgcctctgcctatgccgtcccggctaacgctggctccgggcgcccgcctaaaaggcgggttttagggggctgcgcgaacattcataaaacaggcgtcttacgcctgcgcttttagccgggacttcgtttgacggctcggcatcgggccggattcattcgccgccagaggcggcgtgagaagaggcgcagcaaccgaatcggaaacgcgcatccggccatcgcctctggaagcggttttggtgcttttaacttcgctgcgctcgttttcctccttctggcacggcatagcccgcaagcggtctctgctcgtgctgcgtgcgtcggttgccaccaaaaggtagtgcaaaccacggcggtacgccgtgaataacaccggtccggattaaaatgccgaggctttcagccgcaaaccctccttttcgtccagcccgaacatcaggttcatgttctgcacggcctgtcccgacgcccctttcagcaggttgtcgatgaccgagacgacgtgcagtttcccgccgtatttggctgtgtggagcaacgccttgttggtgttgaccacctgcttgaggtccacgtcgcgttccgtgacgcgggtgaatgccgagggggcgtagaagtcggcgtagagcttcgatgccgcttcgccgtcgagcggacacgccgtgtagacgctcgccaggatgccccgcgtgaagtcgccgcgcatcggcacgaagttcacttcgcggtcgaacgacggctccagcagccgcaggttgcgcccgatctccaggagatgctggtgcgtgaaggccttgtaaaccgaaatgttgtccgaccgccagctgaaatgggtcgtggccgagggttttacgcctgcgcccgtcgaacccgtcaccgccgtcacgtgcgcctcgtcctgcaacagccccgcggcggccagcggcagcagcgccagctggatcgccgtggcgaaacagcccgggttggccacgcgctccgcccggcggatgcgttcgcggttcagctccggaagcccgtagacgaatccgcacgactcgtcgcggaaatcctgcgccaggtcgatgatcttcacgcctgcggggatcgagttctcctccatccagacccggctctgcccgtgggccgagcagaggaacagcacgtcgatcgccccgaggtcgtacgcgtcgcagaaccgcatgccggtgtcgccctccagtcctccgtgcacctgcgcgaggcggttgcccgcgttcgaagtgctgtggacgaaggcgatctccgcctgcggatggttcaccagcaggcggatcagttcgccggcggtgtacccggcgcctccgatgatgccgacccggatcatttcttgttgcgtttctggacgttgtagaaaatcttgatctggttgccgaggatcttcgtgaatcccttcacgtcgtcggccgtccacgccttgttgacctcgccgtactcgccgaagtcggtcttcatcaggtcgaacgtcgagtcgacgcccacgagcgtatagttgcgcggccgcaggatcagctccacggttcccgtcacgttgcgctgcgaggagaggagcatcgcctcgatgtcgcgcatcaccggttcgaggtactgcgcttcgtggaggaacatgccgtaccacgtcgccacctggtctttccagtaggtctgccatttggtcagcgtgtgtttttcgagcatcttgtgcgcggcgatgatcagcatcggcgcggcggcctcgaagcccacgcggcccttgatgccgatgatcgtgtcgccgatgtgcatgtcgcggccgatgccgtatttcgccccgatggcctccacggcgcggatggcctcgaccttgtccgtgtagggcgtgccgttgaccgccgccagctcgccctgctcgaaggtgagtttgagccgctcctcgccctcggccgtgatctggctcggataggcctcctcggggagcgtctgctccgagtggagggtctccttgccgccgatcgaggttccccacagccccttgttgatcgagtactccatcttcttgtagtcggccgtgatgccgtgcttgcggaggtagtcgatctcgtattcgcgcgtcagggtcatgtcgcgcgtcggggtgatgatctcgatctcgggggcgaggatctggaacgtcaggtcgaagcgcacctggtcgttgcccgcgccggtcgaaccgtgggccacggcgtcggcgccgatctgtttggcgtattcgatgatggcgatggcctggaaaatgcgctccgaacttaccgaaatggggtaggtcccgttgcgcaggatgttgccgaagaccatgtagcggatgcttttctcgtagtactcctgctcgatgtcgagcgtcgcgtgtgccgtggcgcccagctccatggcgcgcttctcgatcttttcgagttcgggtttcgagaacccgcccgtgttggcgattgccgtgtaaacgtcgtaacccttctcctcggagaggtattttacacaaaacgaggtgtccagaccgccgctgaacgccagaaccactttcttcttggtttccatgatattctgtttttttgtttttttattcatgctgccggagtgcaaatcctccggtcgttgtcgccgccttcggcgtcgtttgcaattctgaccttcccctgaatcccctcctcggaggggacttgtcgcgacgcgaccgggttgtctcgaatgatatttccgttatttcaggtgaaacagtttttttactttgttccggaaaaacatccggtagggggccagccgcgactgtttcgcgggcggttccttggccgggtcgtagagcatgcccgtgcagaggcacatgcggcggttgttgcgttgcaggatgtcgtagttgcagcagccttcgcagccgcgccagaactcctcgtcttcggtcagttccgagaaggtcacggggacgtagcccattcgcgagttgagcttcataaccggcagcgacgtggtgatactgaataacttggcatacgggaatcgtcgtcgggccagctcgaaggttcgtcgtttgatctgttccgcgagtcccatatggcggtactccggatcgacgataagtcccgaggtggcgacgaagtcgccgtgaccccagcactcgatatagctgaacccgaccagtttttcaccgtccagcgccacgacggccttgccaccggtcatttttgcggcgatgtattcgggcgaccgcttggcgatgcccgtaccccgctgcagggccgactcgtagatcagatcgcaaatacgcggtgcgtaatgtgcgtgcgacgagtcggcgaaaacgacgctgattgtgttgttattcatttatcgtttgtgtgggtaaaaagttgtttgcggaattagttgacgcggtaggcgcgctgcacgcccttgatgcgcatgatctggtgtatgagcgtgtccacgacggccgttccgggcacttcgacggccacttctcccgccacgcagccgttcccggcgggtgcgaagttcatcgagcggatgcccagtttgagatcgcggacgatgacctcggtgatgtggtttgccatgcccgtggtgtcggccgccacgatgcggatcgtgacgcggaacgccccttcggccgactgccgccagcgggcgtcgatcacgcggtaggggtaattctcgcgcatgcgcttggcgttggggcagtcgcagcggtggatggtgattcccgcgctgatcgtcacgaatccgaacacgtcgtcgcccttgatcgggttgcagcatttggccagcttgtactggattttcgagatgtcgtcgtcgatcaccagcgcgtcctgcggagcggccttctcctgcgttccgtgcagcgcggccttctggcgttcgatttcggcggccgcggcgcggcgctcctcttcggcttcgcccgaaaggtggcgtgagaggatctccttgatcgacccgaagtcgagcttctgggtggcgatcagcgcgtagacctccgtgccgaggcgcagtttgaagtatttggccaggtaagccaccgcctcgtcgatcgtgatggcgaatttccagttcttgagtttgcgttccagctcctcgcgccccatgcgcgtgtgcttggcctgctcctcgcgcaggtaggacttgatcttgttgcgggccttcgaggtcaccaccagcgacagccagtccgacttgggtgtctggtttttctgggtggtgatctccacgatgtcgccgttgcgcagctgttcgcggatcggcacggcgcggccgttgacccgtccgcccacgcacgtcgatccgagcgaggtgtggatgtcgaaggcgaagtcgaggagcgtggccccctcggggagtttgcgcaggtcgccgttgggcgtgaagacgaagatttcgcccgacgcgggcttggcgtcgaaacgctgcgccagcgagtgggtcgtgtcctctatcagttcgcgcagatgtcccagccacatttcgctggtctgcgccccctggttgacgcccttgtagcgccagtgcgcggcgataccgcgctcggccacggcgtccatgcgctcggtgcggatctgcacctcgacccagcggccttcggccgacacggtggtgtgcagcgactcgtagccgttcgacttggggatcgagatccagtcgcgcatgcgcttgggattgggcgtgtagaagtccgtcaccaccgaataggccgtccagcagagctgtttctcggcctcctgcgggcagtcgatgatgatgcggatggcgaagatgtcgtagacgccctcgaacgggacgtgctgtttgtgcatcttgttccagatcgagaagatcgatttggtgcggctcttgatgtggtatttgatgccgaggcggtttagccgctgctcgatcggcacgaggaaccgcccgatgaaggccttgcgctcctcggcgctctcttcgagttttgtgacgacgtgctcgtaatccttcggttcgaggtatttcagggcgatgtcctccagctcgctcttgatcgagtagagacccagcttgtgggcgatctgggcgtagaggttcatcgactcccagctcttcttgcgccacttttcgcgggggaacatttcgagcgaacgcatcacttcgagccggtcggccagtttgatcaggatgacgcgcgggtcttcggagtagctcacgatcaggtcccggaaattgtcggcctgctccttggccaccttgagcttcagctccgagatgttggccagacccagcgtgatgcccacgacctgatcgccgaagcgtttgcggatgtcggcgctcagggcgaggaattcttcggcgggcagctgcttgtgggcgaggcgcaccacgtcgtgcaggatcgccgagatggtggagttgcggcccaggcccacctccgagatcacgatcgaagccaccgcggcggcatgctccagcaggggcgagccgtcgtagcgcaccagtccggcgagtttcccgtcggcatactccagcgcctcgtcgacgagtgcccgggtctgctccgagaaattcgcgcgcacgagcgtgcggagtttttcgtaccgtgaaaagtccatttttacctaaccagatgacctatgctcgcaaagatatgaaattttttcataaatttggcatgtacaattgaacagttgtgttatggacaagaaaaaggcagtttacgtgccgaccgtaggcgaggaaatcggcaatgccgtgtcccacggcgtgatgtcgctgttatcgctgctggcccttcctttcgccgccgtgtgggcctatgcgcatgaccccggcggggttctggcctcggtctcggtgtcggttttcgtcatttcgatcttcctgatgttcctcgcctcgacgctctatcactcgatgaacccgcagtcgaagcacaaggaggttttccacatcctcgaccatattttcatctacgtcgccatcgcgggcagctatacgcccatcgcgctgtcggtcatcggcggctggcagggggtgttcatcaccgtcctgcaatgggcgatggtgattttcggggtgttctacaagtcgctctcccgaaagtcgataccggccgtcagcctgaccatctacctggtcatgggctggacgatcgtcttcttcctgccgctgttcatcagccacgcttcgacgcccctcgtggcgctgatcgcgctgggcggcgtgctctatacgctcggcgcgtggttctacgcccgcaagggcttccgctaccaccacatggtgtggcatctgctgatcgacctcgcggttgcggcgcacttcgccgggatcgtgttttacctctactgattatggccgcatatgacctccacatccattccggatacagcagcgacggggagcttcccgtcgccgcaatcgtcggtctgtgcgccgcccgcgggctggacgccttttcgctgaccgaccacaactcggtgcggggcgtcggcgaggccgcccggctggcccgggagcggggcatcgggttcgtccccggcatcgagatcgactgcaactaccgggggacggacctgcacctgctgggctacggcatcgactggcgttcggcggatttcgcgcggttggaggaggaggttgccgccaaagtcatggcgtcgttcggggccatggtcgacaacctgctgaaactgggcttccgggtcgatgccggtgcggtgctggccgccgccgacggaaaaccgccgacgggcgaactgatcgccgaggtgatgctctccgacgcgaactgccatacgcccccgctgcggccctatatggagggcggcgagcggagcgacatgccttacatcaacttctatctcgattatttcgcacagggccgtccggcgttcgtgcccgtggagtatatggattaccgcgatgcggtggagctggtccgcgacaacgggggcgtgcccgtcgtggcgcatccggggctgaatttccggggccgggaggagaccgccgggcggctgctcgaccgcggggccgcaggactggaagtcttcaacaactaccacacccccgaacaggccgtctatttcacctcgctggccctctccaaaggcgcttccatgacctgcggaagcgatttccacggcaagaccaagccccggatcgccgtcgggcgattcccgtcggacagccgtttcgacggccgcctgtcagactttgtaaaccacatacatgtgatcggccggcagggcgtatagcctgcgctcggcctcggtgaaggttgcggcgtagtcgatgtccgcgacctggaaacccgcctggcgcaggcggtcggcatagtcggcgccgtagatgcgccggtggtcgtactgtccgaagatgcgcgtgcgctcgtcgggatcggtgatcgagtcgtcctcgtaggtctgctcgtagtccctgtccaccggggagaggacgatgccccagccgccgggtttgaggacccggtgcagttcgcgcatcgcccgccggtcgtcggcgacgtgctccatgatgtggttgcagatcaccacgtccaccgaaccgtcggccagcgggatctgctgcacgtcgaaatgcaggtcggccagcgggctttcgagatcggccgtgacatactgccccggatgcgacttgaagtggggcttgaggtgacgcatgatacagacctcgggagcaatgtgcagcgtgcgcggaaaggccgtcaggagatcggtttcgcgcgtcaggtagagccacagcaggcggtgccgctccagtgacagacacttgggacacagcgcgttgggccgcggctgcacgtagccgtagggcatgaacttccggtatttcgcgccgcacacggggcattcggctccgcgccccttgtagaagagccccgccacgggtacggcccatcccgcgatgcgttgcagcacggggcgcgggatgtggttgagcgagaatttgatcagttgttttatcattgcgcgactatctgttttttgtgccgaccctccggagcgtacgccatctccctctccgggggagggtcggggtggggtcggatttgtcaatgacgccgcagacggcaacggccgcattcaggagcggctggcggaggattttacgcatgcagcgggattactctaaaatcttgttcacgtcggcttcggccttgcgcagccgcgccttgcacgaggcgatcagctccgtggcgcgcttcacctcggcggcgaggctgtccacgtccatctcttcgttgcgcaggcgtgccagtatcttttcgatttcggccatcgcctcggcgtaggtcacttctttttttgccatatttttccggaatttacggttgcgtctatcttgccgtcggagacctcgatttcgacctgctcgccctccgcgacgcttccggccgaggtcacggcacggcctccggcgcgcaggacggcgaatcccagccggaggatgcgttcgggcgaacgtccggcgatcagttccgcggcgttgccgagccgcacgccctgccgcgcgaggaagtcgcgcgccgcgtcgggcagcagccctgtgaaatgttccagacgcagcgtctgccgcgtgaggagttcgccgctcagccgccgcacttcgcccgagaggcgttcgagacgcacctccgaggcgtgcatcgcggccttcgtcatgtcgttcagttgcagggcggcgcagtcgagccacccgtcggtttcggccatccgttcgaccagccatccggccaccgccgtcggggttttgagcgccgtgtgggccaccatgtcggccacgctggtgtccttgtcgtgcccgatgcccgtcaccaccggcagcgggaactgcgccacgtgggcgcagaggcggtaggcgttgaagcagttgaggtcgctgcgcgacccgcctccgcggatcagcaccacggcgtcgaatttttccggccgggccgcgacgttgcacagggcttcgatgatggattcctcggccgcttcgccctgcatgaaggcgtcgaacagggtcagctcgaaacggtaggggcttcgggccagctccttgcagaagtcctgatagccggcggcgttggcgctcgacacgatggccacgcgctgcacgacggccggcatcggcgcctcgcggttcatgtcccagacgccctcctgctgcaactgcgcgatggtctgctgccgctgccgctccatgtcgcccagcgtgtaggaggggtcgatgtcggtgatctggagcgagaagccgtaaagttcgtggtaggtgaccagcgccttggccagtattttgatgcccgcggcgagccgctggcccgtttcggcctcgaaatagcctgcgatgcgggggtagttcgaacgccacacgacggctcgggcctgcgctgtcggcacgccgttgtcgccgcccttctccacaagctccaggtagcagtggcccgagtagttgaccttgatttccgaaatctcggcgctcacccagaggggcagcgcgaactgcccttcgagcgccgacttcacgcggcgctgcaactcgcgcagggtaatgtgttgtgattcagtcatcggcccagcagaattccgagggtgaacaaggctccgaacagcaggatgttgcgggccgtttcacccagacagacgttcagcgcgtcgccgtggtcgatgcgcaccatcttgcgccatgtggagatatgtgcggcgaggtagggaaggggaagcagggcggcccacgtgcggcctgcgaagagcagcgtgagacacagcgcgacggccgcggttcccagggcgagataaccccagcggccgacgcctgcgccgaggcagacgacgatcgtgcgtttgttgcagcgggcgtcctcctcgcggtcgcggaagttgttgatcatcagcattgtgtcgatcacgaggccgcaggccagcgcggcgacgagaacctccggggtccacgcgccggtctggatgtaataggtgaatcccacggggaccagtccgaaaaagaggatgaccgcggcgtcgcccagcccgtggtaggccagcgggtaagggcctgcggtgtagaaccaggcgaagacgatgcaggcggcgcctgcggcgacgagttcccagcctccgtagcggagcgcgcctgcgtggagcgcccagacgagcagcgcgacgcccgcggcgcaggccgcgagggtgaatcccgcaatgcccgccttcatggccccgagggtgatgtagcctttggcgaaggcgcggtcgggacccagccggtcgggctggtcggcccccttcaggaagtcccagagatcgttcaccaggttggccgtgcactgcatcagcagggcgaatgcgaggcacagcacggccggaagccaatggaatccgcggtcggtccaggccagtgcggagccgatcaggacgaggatgacggagttgccgaggctgtacggcctgacggccagaatccatgcggagagggagttggttttcacgtttcggagtttttcaggggcttttgcagatgaggtttgcgggtttcgggagcggagttgtcagcggatgaccagctccgcctgccgcggcatgcgccggccttcgggaagctggatgctcaacacgccttcgctttcgaccggcgcgccgttcttctgcgccggatgccagcgcggggcttccgccacggctttcagcacgcgccgcttgaggcggttgtcggtcgattcgagctcctgttggacgacggtctcgccgtcgggcgtgatcttgtagcgcagcaccacgcgcgccgtgggttcgctctcgtcccagcgcacctgccgggcgatgtagctgccgaaggcggagtccgcggggaaggaggccggccggtcgtagcgcagcgtaatgagcatcacgccgtgtgcggcccgctggccgtagcgggcgatggtctcctcgtcggcggggagcatctcgacgttctcgatgtcctcgggcggaatcgagcgtatctcggacgtctccttgccgttgacgatgtacaggggctgcggcctgggcgtcgcggcacggacggctgcggcgagaaacaggatgtagagaagcagtgcgtatcttttcataccgtaatctttttttgcaaaacggccggcagggccgggatattgcctgcggactatccgatctcctcccagcccgaagccgaaaggtccacgcagccgttggcccggaaatggacgccttcggctgcgagcaactcccgctgtccggtccatccgggcgctgtccggccctggctgttgacgacccggtggcagggcaggccttccggagccagcgccagcgcccgtcccgcgcggcgcgcatggccgggcatgccgatcagccgggccagctgcccgtaggtcgcgacccgtcctgcgggaatctctgcgacgacgctccagatctcggcgtcgaaatcggcgggaatcttcatcgcttgtttcgtttatctgaaacggccggagccgaatccggggcgcaagtccggcccctccctcctgaaagccgttttttagacggcccggggcaacgggtttcggcagcggctcatcccgcccctgctgtccctgctgtccctgctgcccctgctgtccctgctgcccctgctgcccctgctgcccctgctgcccctgaaaagggctttttaagcagctaaagttcgctctctttcagacgttcggcgttctcggccacgatcaggtggtcgatgcagtcctggatgtcgccgtccatgaaggccgcgaggttgtagatcgtatagttgatgcggtggtcggtgatgcgcccctgcgggtagttgtaggtgcggatcttggccgaacggtcgcccgtcgagaccatcgttttgcgcttcgaggcgatttcgtcgaggtatttcgagtattcgaggttgaagacgcgcgtgcgcagctcctcgaaagccttgtcgaagtttttcagctgcgatttctggtcctggcactgcacgacgatgcccgtggggatgtgcgtcaggcggatggccgaataggtcgtgttgaccgactggccgccgggaccgctcgcacagaagatgtccttgcggatgtcgttcatcgagatttcgatgtcgaactcctcggcttcggggagcacggccaccgatgcggccgaggtgtgcacgcggccctgcgtctcggtctggggcacgcgctgcacgcggtgcacgcccgactcgtatttgagcgtcccgtagacgttctgtcccgataccttcagcaccacctccttgaaaccgcctgcggcgccgtccgacgaggaggtgatttcgtagcgccagcctttcgactcgatgtatttggtgtacatgcgcagcaggtcgccggcgaagatcgccgcctcgtcgccgcccgttccgccgcggatctccacgatggcgtttttcgagtcctgcgggtccttggggatcagcagcagcttgatctcctcctccatctgtgcgagctgcggctccagctcggcgatcatctcgcgggccatttcgcgcatctcctcgtccttgtccgtggccagcgtgtccttggcttcggcgaggttggcgatggccgtgcggtagcgttccgaagtctcgatgatcggctccagctccttgtattccttggtcagttggatgaactgtttgacgtcggcgatcacttcggggtcggtgagtttctgccccgtctcctcgtatttgagtttcaaaccgtcgaggcggttcaggatggtgttgtctgccataaaaatgtgtcgtgtctttgttttggggacaaagatacgacacatttaattaagaattgaaaattaagaattaaaaaattaagcgaaggccgcagcggctctctctcgggaccggcgttctttcgcaaggaaaaatgggaaataaccggcaaacggcaatgcacggaccggagaaaccgacggagggaacccctcgtgcgggattccctccgggatgtcgtcgccgggcggccgttccggttcgttccggtgtgcggctgccggggcgcggttcgtgcccggcctgcttattcgttgatccggcggagccagtccagcacggcgtcctgccactgggccttgtagcggaacgagtcgcggatgccccagccgtggccgcccgaggggtaaatgtgcatcgaggcttcgatgccgtgcgccttcagggcgttgtagtagagcgtgctgttgacgggcggaacggtcttgtcgtcgtccgagagcagcaggatggcgggcggggtgtcggccgtcacgcggctctccagcgagtaggctgcgtcctgctcgggggtgcgctgctcgctcagcaggttgatgaacgatccctggtggcgtttgccctgcacggccgtgatgaccgggtagaagaggaccgagaaggccggtttgaaactgccgatcgtcgaggccatcgccgcgaggtgtccgccggccgaagagccgacgatgcccactttgtccgccgtgtagcccgtggcgcccgcttcgagtcccgccatgatgcgcagggcctgtacggcgtcctccagcggcacttcgggatggtggttgggcatccggtatttcagcacggcgcccgtgatgccgttggcggcgaaccatttcgccatttcgtagccctcgtggtccatggccagcatgccgtagccgccgcccgggcagatgacgacggcctggccggtggtcttggccttgtcggccgggaagatgtagagagtcgcttcggaggtgttccgtacgcggttgggttccttttccgtttccggcgtcgtgatgccgttgctgtggggcgcggtcgtgttgtcccagattttgagggtcgcggtctgtccgtaatcctgtgccgatgctgttgcggtcataagcaggagtgttgtgataagcggtagtgtgcgtttcataaatcggtattttaggcgtgacggggtgtcagatcacgatgtttatgatcttgcccggcacgacgatgatctttttcggggttttgccttcgagccatttctgcgcctcgggggccgtgacgacgtcggcctgaatctcggcgggcgtcatcgaagcggcatactccttccggaagcggagcttgccgttgaccgacacggggtattcgaacgagttccgcacgaggtgcgtctcgtcgcagaccggataggaggccgtgcagaccgattcggtgtgtccgagcgcggcccacagctcctcggcgatgtgcggggcgaagggggcgagcagcacggtcagcggttcgagcacttcgcgcttcgaacactcgcccagctcgttgaggcagatcataaaggccgccacggaggtgttgaacgagaagttctcgatgtcctccgagaccttcttgatggtcttgtggagggtgcgcagctcctgctcggtcgccttttcatccgtgacgcacagctgcccgtcgcggtcgaagaacaggcgccagaagcggcgcaggaatttgtgcacgccgtcgatgccgttcgtgtcccagggtttcgactgctccagcggtccgaggaacatctcgtacatgcgcagcgtgtcggcgccgtagttgtcgacgatgtagtcggggttcacgacgttgtagaacgacttcgacattttctcgatggcccagccgcagacgtacttgccgtcctcgaggatgaattcggcgtccttgtattcgggcatccatgcgcggaaggcgtcgaggtcgaggatgtcgttgcggacgatgttcacgtcgacgtagagcgcctgcgtctcgtactggtccttgaggcccagcgacacgaacctgttggttcccacgatgcggtagacgaagttcgagcgcccctggatcatgccctggttgacgagtttgcggaacggctcctcctcgcagacgcagcccaggtcgtagaggaacatgttccagaagcgcgagtacatcaggtgacccgtggcgtgctcgatgccgcccacgtagaggtcgacgttgcgccagtactcgtccgcctctttcccgacgagcgcctcgtcgttgtgcgggtccatgtagcggaggtagtaggccgacgatccggcgaatccgggcatcgtcgacagttcgtaggggcagccctcgggcgtcgcccatcccttgacgcgggccagcggcggttcgccctcggccgtggggccgaaattctcgatgggcggcagctccagcggcagtttgtcctccgccagcgggtaggccgtgtcgttcttatagtagatcgggaacggctcgccccagtagcgctggcgcgagaaaatggcgtcgcgcaggcggtagttgacgagctttttgcccagtccgcgcttctcgacttcggcgaacatcacctgaatcgcctcctttacatccatgccgttgaggaaatccgagttgattactttccccgttttggcgtcgtacgactctttctcgatgtcgctgccctcgaccaccgggacgatctccagtccgaagtgacgggcgaaggcccagtcgcgcgagtcgtgcgccggaacggccatgatggcgcccgttccgtagcccgagagcacgtagtcggaaatgtagatcggaatggctttgttcgtgaaggggttgatggcgtaggagcctgtcgcaacgccgcttacgcgcttcgtgtcggcgatgcggtcgcgctccgaacgctttttggtctggcggatgtactcctcgacggcggccttgttctcgggcgtcgtcagttcgccgacccactcgtgctcgggggcgatgaccatgaacgtcacgccgaagatcgtgtcgggacgggtggtgaagatctccagtttccggtcgctgttctcgatgtcgaagaagacctgggcgccctccgagcggccgatccagttgcgctggatctccttcagcgagtcgctccattcgagtttgtccagtccgtcgagcatgcgctgggcgtaggccgtcacgcgcagaagccattgtttcatgcgcttctgctcgaccggatagccgccgcggaccgaaagtccgtcgtgcacttcgtcgttggccagcacagtccccagcttcggacaccagttgacctgggtgtcggcgcggaaggcgaggcggtagttctgaaggatctgttccttctcccgctcgcttttggcgttccattcggcggccgtgaagtgcatctcggtcgtgcaggcggcgtccagcccctcggtgccgctcgtttcgaaggcggcggtcagttccgcgacggggcgcgcctgctgtttcgaacggtcgtaccaatgggagaacatctcgaggaacgcccactgcgtccacttgtagtatccggggtcgcacgtgcgcacctcgcggtcccagtcgaacgagaatccgatcttgtccagctgttcgcggtagcgggcgatgttctgctcggtcgtgacggcgggatgctgccccgtctggatcgcatactgctcggcgggaaggccgaaggcgtcgtaacccatcgggtggaggacgttgaatcccttgagccgcttgtagcgcgagtagatgtccgaggcgatgtagcccagcggatggccgacgtgcaggcccgctcccgaagggtaggggaacatgtccagcacgtagaatttgggccgcgaggggtccgtctccaccttgtaggttttgtccgccctccagcggctttgccatttggcctcgatctccttgaaattgtactccatatgtcgtgtaattttgttgcggattttcccgcaaagatagaaaaaaaaacgtatctttatccgggagtggcgcatgtcggatttaaattgcgagcttatgggtaaatttaaagtttttttgctgggcgttccgctggcgctgggtgtgcttgccggctgttcggaggaggtggaatacgagatgccgatctatgatttcgtgaatccttcggtctgctttttcgtttccgacgccgcgacgggcgtgaatctgctcgatcccgatgagcctgatgcgattctcggccggcccatcgccgtgacatacggcggaaaacgctacgaagtggcggcggacgccgttgcggccccggcgacgcgggccacgatgccgcggccgctggcgctgcggctcgaaggggcgaatgagtacgacaggatcaagggctatcacctcgctttcggagaattcgatccgacggatggtctgaaagggcagtcgttcgtggtcgactggggcgacgggacctccacgaaggtggagttcgacctctacgtggtctggaagaaaaaccgcaaagagcgcatttacgaggcggaggtgcacagcccgatccgtgtcgacggcgcggcgcgcggcgagggttattacgacgcgtggatcattcggatcacccggtgacgggcggtctgcgtgccgcagtgcggctgcatgggaaaaaagggggcgcggccattcgggcgcgccccctttttttcgtttgcgggatgcgtcagtcgtagagcgggacgacgtacatcgagtaggcttcgctgtgacctgtgccgtcggagagcgtgtatcggatttcgtcgccgtgccatacgacggcggtccgcgtcgtgccgaaaatcgttccggcggtgaatatgtcgtcgtagcagacggcgaccgaatagggcatcgagccgctgcccgggccgtcggagaggtcgaacagctcctgtccctccttccagacgacgccctcctcctcgaagccgtcggtgtggtaacccgccgtgtagagcgtgtgtccgaaccggcagacggcggtggcttcggcataggaactgccatcggtcagggtgtagagcagctccttgtccttccagaccgctgcggcgccgcccgagtggcctgcggcgtagagcgtcctgcccgaaaggcagagcgcgttcactccggcgggggtctccccgtcggagagcgtgtagtgcgccttgtcgtttttccagaccacggcgagcggcttcgtgagcccgctttgcagactgcctgcggcgtagacgtcgccgcccgagacgcagaccgaccgggcctgcgagacggccgggctgaccgaataggcgtagagcgcatcgccgtctttccagattttcgccgtcaaggctccgccgctctcctcgctcccggccgtgtagaggctgccgtttgcggcgaagaccgagtaggcgtacgagtcggcgccgggagcgcccggggtgtatttcagcgtgccgttttcccagaccttcgccacgatccggtcgccctgccgttcgtagccggcggcatagaccgtgccgtccgaaacgcagaccgcgtaggcccaggcgtcgttcgtgccgttggtcaaggtgtagagcagctgcccgtttttccagaccgttgcgacggccttcgatgcgggcgtggtgtagcccgccgtgtagatgtcgtagccggagggtttcggcggttcgggggcgtcgtcgtccgaactgcacgccgcgaagccggcgaatgcggcgagaagcgccggtaaaagcgtgtgtgtgaatcgttttctgatgattgtcatggttttgcggtgcagtttgttttcgggccgttcctgtcgggaggggctgtctgcacgccgtttgcggggcaaagtccgtgccggggatcaaggcccggaacattcggtttatggcgttgataataaatccgttgtcagtttatgtataaccagaatttattttatgataaattctataagtaaaaagtattgcaaacggcgtaaaatcctgggaaatggcgaaaaaagacgtgcatatatattgtatttccgaaaaaatgcgtacctttgcagtccattttggacaatggagatagattttttaacaattaaaggacagttttagaaatgccaactattcaacagttagtgagaaacggccgtgtgaagatggaggacaagtcgaagtctcccgcactggctgcgtgtccccagcgccgaggcgtatgtacgcgtgtgtacacgacgaccccgaagaagccgaactcggcaatgcgtaaggtagcgcgtgtaagattgaccaacggcaaggaggtcaacgcctacatccccggagaaggccacaacttgcaggagcactccatcgtgctcgtccgcggcggtcgtgtgaaggacctccccggtgtacgttatcacctggtgcgcggtgcgctcgactcggcaggcgtggacggacgtcgtcagcgtcgttcgaagtacggagccaaacgtcccaaggcaggcaagtagtcaacaacaagagagtttttaacagatcatttttaaatagcaatgagaaaagctaagccaaaaaagcgaattctacttccggatccgaagttcggagacgtggctgtgacccgtttcgtgaacaaccttatgctggatggtaagaagagtattgcctacacgattttctacgactcgctcgaaatcgtcggcaagaagatgaaggatgctgataaatctccgctggaagtctggaaacaggctctggagaacatcacaccccaagtcgaagtgaaatcgaagcgtatcggaggtgcgacgttccaggttcctatggaggttcgtccggagcgcaagatttctatttccatgaaaaaccttgtcctctattcccgcaagcgcgccggcaagacgatggcagacaagctttcagcagagatactggatgcctacaaccagcagggcgcagccttcaagcgtaaggaggagatgcaccgcatggccgaggccaacaaggcattcgcacactttagattctaataaggagaccgaacagatggcaaccagagatttaaaatatactcgcaatatcggtatcatggctcacatcgatgccggtaaaaccaccacgtcggagcgaatccttttctacacgggcaaaacccacaagatcggtgaaacgcacgaaggcgctgccgtcatggactggatggttcaggagcaggagcgcggcatcacgatcacctcggctgcaacgaccgctttctggaactacatgggcaaccagtaccagatcaacctgatcgacaccccgggacacgtcgacttcacggtcgaggtggagcgttcgctgcgcgtgctggacggcgctatcgccacgttctgcgccgtaggcggcgtggagccgcagtcggagaccgtatggcgtcaggccgacaagtacaacgtgccccgtctgggttacgtcaacaagatggaccgcacgggcgccgacttcctgtcggtgtgcgcacagatcaaggagcacttcggagctacggcccttccggtcgttctgcctatcggcgccgaggacaagttcgaaggtctggtagaccttatatataataacgctatctattattacgacgacaagaccgtccgcgacaacttcgagctgaaggagattcccgagtcgatgaaggccgaggccgccgagtggcgcggcaagctcatcgaggaggtggcttccaccgacgatgcgctgatggagaagttcttcgaggaccccgattcgatcaccgccgacgagctgctcgcagcgatccgcaaggcgacgatctcgatgcagatcgtcccgatgctctgcggttcgtcgttccacaacaagggcgtgcagaaactgctcgactacgtgatggctttcctgccctcgccgctcgacctgccccccgttacgggcatgaaccccaaaaccgagcaggaagaggttcgccacgcttcggagagcgatccgttctgcggtctggcgttcaagatcgctaccgacccgttcgtaggccgtctggctttcgtgcgcgtatactcgggtaagctcgatgccggttcctacatcctggacacccgcagcggcaagcgcgagcgtatcagccgcatctaccagatgcacgccaacaagcagaacccgatggagaccgtcggcgccggcgacatctgcgcggccgtaggtttcaaggagatccgcacgggcgacacgctctgcgccgagaacgcacccatcgtgctggagcagatgaccttccccgagccggtgatcggtctggccgtggagccgaagacccagaaggacctcgacaagctcggcatcgccctgggcaagctggctgaagaggaccccaccttcacggtgcacaccgacgaggattcgggtcagacggtgatcagcggcatgggcgagcttcacctcgacatcatcgtggaccgtctgcgccgcgagttcggtgtggagatcaaccagggcgctccccaggtgaactacaaggagtcgctcaccaagacggttcagcaccgcgaggtcttcaagaagcagaccggcggtcgcggtaagtttgccgacatcatcttcgagatcggtcccgccgacgacggcgccatgggccttacgttcgtagaccaggtcaagggcggtaacattcccaaggagtttatccccgccgtgcagaagggcttcgcttcggcgatggcgaacggtgcgctggccggctacaagatggactcgatgaagatcacgttgctcgacggttcgttccaccccgtggactccgaccagctgtcgttcgagatcgcagcccgcaacggttaccgcgcagcggctcccaaggccggttcggtgattatggagcctattatgaacgtggaggtcgtgacccccgaggagaacatgggcgacatcatcggcgacctgaacaagcgtcgcggacaggttaccggcatggagtcgaaaggcaccgcccgcgtggtgaaggccaaggttcccctgtcggagatgttcggctatgtgaccgtactgcgtacgatttcgtcgggccgcgcaacctcgtccatggagttctcgcacttcgaggaggtccctgccaacctggccaaggagatcatcgagaaagcgagtggtaaacgtaaggatatagaataagcaaacaatatgaaccagaagattagaatcaagttaaagtcattcgatcacaatctcgtggacaagtcggccgagaagattgtgaagactgtgaagagcacgggcgccgtcgtgagcggcccggtgccccttcccacgcacaagcagatttttacggtcaaccgctcgactttcgtcaacaagaaagcccgcgagcagttccagctctgcaccttcaagcgtatcctcgacatctactcgtcgacgcccaaaacgatcgacgcgctgatgaaactggagcttccctcgggtgtggaggtagagatcaaggtgtgatcggacaggatgtctgccggttttccgagctgtaacccgggtttcttcgaaagaaggaaccgggggcgggtcggctcggcgagcgttgccccgggcaggggaacgggagcggggcaggacgacgggaaccggaggtgattgattatatatagtgtaccaaccgtgcggagcgcacgccatctccctccccgagggagggccgggatggagccggatttgtcaatggcgccgcaggcggcaatggcggctgaaagcgatcggtacatcgaaatatatgataaccagacggcaagacaaaaaacgttacatcactttattactatttataacaaacaattgacaacaaatgtcaggacttattggaaagaaaatcggaatgacttccgtttacagtgccgagggtaagaacataccatgcactgtcattgaggctggaccgtgcgttgttacgcaaatcaagaccgtcgagaaggatacctacgaggcggttcagattgcctatgacgagacgagtgaaaagcacgccaccagcagtttgttaggtcacttcaagaaagccggcacgactccgaaacgcaaacttgcggaattcaaggacatgcctgaagtgaatctcggcgacacgctgaccgtagaactcttctcggaagaggactgggtggacgtgaccgggatctcgaaaggaaaaggcttccagggcgtagtgaagcgtcacggcttcggcggcgtcggcggccagacccacggccagcacaaccgtgcgcgcaagccgggttcgctgggcgcgtcgtcctatccctcgcgcgtcttcaagggcaaacgtctgcccggccagatgggcggcgagcaggtcaaggttttgaacctgcgtgtattgaaagtaatccccgagagcaacctcatcctcgtgaaaggttcgattccgggagcaaaaggtgcttatttaacgattgaaaaatagtatggaattagctgtattaaacacacaaggaaaagagacgggtcgtaaggtagtcctttcggacgccgtcttcggcgtggaggctaatgaccacgctatttacctcgacgtgaagcagtatctcgctgaccagcgtcagggtacgcacaagtcgaagcagcgcaacgaagttgccggctcgacgcgcaaactcaagcgtcagaaaggcaccggcggcgcccgtgcgggcagcatcaagtcgcccctgttcccgggaggcggccgcatcttcggtccccagccccgcgattacagcttcaagctcaacaagaagttcaagcagctggcccgccgcagcgcgctgacctacaaggctcaggccggcgccatcagcatcgtcgagacgatgtcgctggaggctcccaagaccaagtcggtcgtggctctggccgaggcgctcaaggtcgacgacaagaaggtgctgctggttctccccgaatcgaacgtcaacctgcagctgtcgtgccgcaaccttccctatgtgaagcccgtgctggctcagaacgtctgcacctacgacgtgatgaacgcatcggccatcgtgatggtggaaggcgccgagaatgtattgaatacgatgttagcttaaaaacgcaagttacaatggacattattattaagccggttttgaccgagaaaatgacgattcagggcgaaaagttgaatcgctacggttttatcgttgacgtgagggctaacaagctgcagattcgcaatgccgtagagcagatgtacaacgtcgtcgttacggacgtgaacaccgtgaactacatgggcaaactcaagagccgctacaccaaggcgggcctcttggagggtcgcgccaataacttcaagaaggcgatcgtcaccttgaaggatggagacaagatcgatttttacagtaatatctaacgaagatggcagtaagaaaatttaaacctgtaaccgcaggtacgagacataagattatcggcacgttcgacgagatcacgacgtcgaaaccggagaaatcgctgctcagccccaagaagagctcgggtggacgtaacaacgacggcaagatgacggtccgctacatcggcggcggtcacaagcagatgtatcgtaacgtcgacttcaaacgctcgaaggacggcatcgccgcaactgtaaaaacgatcgagtacgaccccaatcgtaccgcacgcatcgcactcctggtatacgccgacggtgagaagagctacatcatcgcacccaacggactccaggtgggccagaccgtcatgagcggcgcaggcgtcgctcccgaggtcggaaacacgctcttcctgagcgagattcccctgggtacggtcgtccacaacattgaactctaccccggtcagggggccgctatggcccgttcggccggttcctacgcccagctgctggctcgtgaaggcaaattcgccgtcatcaagctgccttcgggcgagactcgtatggtactcgtaacttgccgcgctacggtgggtgtcgtgtcgaacgtcgaccacagcctcgaaagctcgggcaaggcaggacgcgagcgttggctcggccgccgtccgcgcaaccgcggtgtcgtcatgaacccggtggatcacccgatgggtggtggcgaaggccgtgcgtcgggtggtcacccgcgttcgcgcaagggtctgcttgccaagggttataagactcgtaacccgaagaagacgacctcgaagtttattatttccaagaagaaaaaataattaaataagagtacataatgagccgttcattaaaaaaaggaccgtttatcgaccccaagctcgaagcgaagatcgtcgcccaggcggaaggaaataaaaagtcggtaatcaagacatggtcgcgagcaagtatgatctcgcctgacttcgtaggtcagacggtagctgtccacaacggaaacaaattcattccggtgtatgtaacagagaacatggtaggacacaaactcggcgagtttgctcccacccgcaacttccgcggtcacgcaggtaacaagaaaaaataggtagaaaatgggtgcaagaaaagcaaataaagccgcacagttaaaggctgaaaagaagcagaaggctatcgccattatgcgtgattgcccgacctctccccgcaagatgcgcctggtggccgacatcatccgcggcgtggagatcaacaaggctctgggcatccttcgttactcgaagaaggaggcgtcgatccgtatggagaagctcctcaagtcggcgatcgccaactgggaggccaagaacgagtcggagcgtctggaggatgtgaaactctgcgtgaaagaggtattcgtcgacggcggtcgcatgctgaagcgtattcaggctgcgccccagggtcgcgcacaccggatccgcaagcgttcgaaccacgtaacgatcgtagttgacaaaatggtaaccgtagaaaacaagtaatcagatgggacagaaagttaatccgatagcaaatcgtcttggtatcatccggggttgggattccaactggttcggaggcaaggatttctccgacaaactcgtcgaggacgccaagatccgcaagtatctgaatgtccgtctggcgaaggcgtcgatctcgaagatcatcatcgagcgcacgctcaaactggtgacggttacgatttcgaccgcccgtccgggcatcatcatcggcaagggcggccaggaggtcgacaagctgaaggaggagctgaagaagctcaccggcaaggagatccagatcaacatcttcgaggtgaaacgccccgaggtggacgctgtcatcgtcggccagaacatcgcccgccagctggagggccgcgtatcgttccgccgcgccgtgaagacggccgtggcttcgaccatgcgcatgggcgccgagggtatcaagatccaggttgccggccgtgtcggcggcgccgagatggcccgtacggagacgatcaaggagggacgcattccgctgcacacgttccgcgcagacatcgactactgcctcacggaggccctcacgaaagtgggtatcctgggcgtgaaggtgtggatctgccagggcatcgtatacggccagcgcgacctgttcgaaatcgcaggcgcttcggcgcaggcaccttcgggcgaccgcggtgagcgcggcgaccgtcgtggcggacgcggagaccgcggagaccgtcgcggtggagaccgtcgcggcggacgccggggcggagaccgtcgcaataacaatcagtaagtaggacctttttaaagcagaactaacatgttacagccgaaaaagaccaaatttagaagaatgcagaaaggccgtatgaagggtatcgctcaaagaggtaaccagcttgcatacggatcgttcgcaatcaaggcacttgaatcgacctggatcacgggtcgtcagatagaggcggcacgtcaggccattacgcgttacatgaagcgtgagggacagctgtggatccgcatcttccccgataaacccatcacgaagaagcccgccgaggtacgtatgggtaagggtaaaggtaatcccgaaggcttcgtggcgcctgttacgcccggacgcattctcttcgaggcagagggtgtgcccctggcggttgcgcaggaagcgctgcgtctgggcgcccagaaactgcccatcaccaccaagtttatcgtaagacgtgactacgtcgaaaccacaatttaagggacacagaacatgaaaagtgcagaaatcaaggatatttcgacaaaggacctgcaggagcgcatcgagaccgaaaaggcccagctcgcgaagctgaaggtgcagcacgcggtgtcccccgtcgagaacccgtcgatcattaagaagaaccgcagagatatagctcgcatgctgaccgttctgcgtcaaaaaaacgctaaataacgagaacaactatggaaagaaatcttagaaaagagcgtatcggtgtggttgtcagcaacaagatggagaaaaccattgtggttgcagtagcacgtaaggtgaagcatcctatctacggtaagttcgtgaacaagacgaccaagttcgtggccgagtcgctcgacgagacctgcaaggagggcgataccgtacgcatcatggaaacccgcccgctgagcaaaacgaagcgttggagattagtacaaatcattgaaagagctaagtagttatgatacaacaggaaagtagactcattgtagctgataacagcggtgcgaaggaggtcctctgcatccgggtgctcggcggcacgaagcgtcgctacgcatccatcggcgataagatcgtcgtggctgtcaagagcgcgactccctcgggcgatgtcaagaagggcgccgtgtcgaaagccgtagtcgtgagaaccacgaaggaaatcagacgtgccaacggttcgtacattcgtttcgacgacaacgccgtggtgctgcttaacaaccagggtgaaatgcgcggtactcgtatattcggccccgtagctcgcgagctgcgcgaccagtatatgaagattatctccctcgcacccgaagtattgtaatcataaaaactatttcggatatgtcaaaattacatattaagaaaggggatcaggttcaggttatcgccggtgacagcaaaggccagacgggcaaagtcctgaaggtcgaggtttcgaagcagcgcgccatcgtcgaaggtgtgaacctctgcaagaaggccacgaagcccaatgcgcagaacccccagggaggcatcgtcgagaaagaggctccgattcacatttcgaacctcatgctcatcgaccccaagtcgggcaaacccaccaaggtcggccgcaagacggatgcaaaaggtaaattagttcgtttcgctaaaaagtcaggggaggagatcaaataatggcatacgtacctacactcaagacaaaatataaggagcagatcaaatctgtccttatgaaggagttcggttacacgagcattatgcagtgcccgaagctcacgaagatcgtaatcaaccagggtatgggccaggctgtcgccgataagaaactcatcgacgtggccgaagccgaactgacgcagatcaccggtcagaaggccgttcagacccgctcgcgcaaggacatttcgaacttcaagctgcgtaagggcatgccgatcggcgtgcgcgtgacgctgcgcgacacgaagatgtacgagtttctggagcgtctgatcgctgtcgctcttccccgaatccgggatttcaagggtatcaacgagaagttcgacggccagggcaactacaccctgggcatcaccgagcagatcatcttcccggagatcgacatcgacaagatcaccaagatcttcggcatggagatcacgttcgtaacgacggccaaaactgacgaggaggcttacgccctgctccgcgagttcggtcttcctttcaaaaacgctaaaaagaatcaataagctatggcaaaagaatctatgaaggcccgcgaggtgaagcgtgcgaaactcgcaaaccgctatgctcacaagcgcgaggagatcgctgccaaggtgaagagcggtgagatggatcacgaagaggcatggcaggcgcttgcgaagctgccccgcaactcgaatcccatccgccagcacaatcgctgcaagatcacggggcgtcccaagggctacattcgcctgttcggcatcagccgtatccagttccgcgaaatggcctcgaaggggctgatcccgggcgttacgaaagccagctggtagcagccgcaggtgcggggagggcgagcgtgcgaccgcctgaaacccgcagatcctgcgattctgaataaaagttccgttttccggaaggtgaggagcctgtggagagcgagtctctcggaaggaaacggggccgataggggtgttcagcccgtgtagatacgtcacagtgtcggggaaagtgccgccgcaagcggtaacttcccgatatgtggggcgtaacgaggggttgggcgcttggttacaaatttctcggaccaggggccggaaggttgatgccgtggctgcgtgagcggagggcggatgccggaaggtttagccgaagggacaatgcggaagttgcgcaacgcggcggaagcgaagactttcaggctgccggaacggagggacgaaacggggctgcgtagggcggtccgtgtggcgttccgaagggcgggaatcgggaccagggtgcggcgaatgccgtgccggaggaaccgaaagactgtcgccgaaagggaattttgtgcggatacatgttagcaacatcgggtgctaacattgtctgcgttccggaggcagggctaaaatcgctaaaaatcaggcgataacttggctgtttgggaaataatgcgtatatttgcgcgctttaggccctcgcgtgcgtatgcgggtggggttgccggcaagaaaaggggtggggctaatatcctgaacctcaaagaaataaaaacaaagggctgccgtgaaatatcgaaggcccagctaattaactaatttttaatttttaacttctattcgttatgactgatcctattgcggactttctgaccagaattagaaacgcggtgaaagccaaccacaaggtggttgaagctcccggttcaaaaattaagcaggagatgaccaagatcctctatgagcagggttatattctcgcttacaaattcgacaaggacgagaaaggtcatccgtcgatcaaaatcgctctgaagtgggaccccgccaccaagaccaacgccatcaaggacctcaagcgcgtaagccgcccgggtctgcgccgctatgcgtcggtttcggacatgccccgcgttttgaacggcctgggcatcgccatcgtttccacgtcgaaaggcatcatgaccgacgccaaggcccgtcaggagaacgtgggcggcgaggtgctgtgctatatctactaatcgcaaatcattaaagaacaacacaatgtcaagaattggtaaattacctgtaaacctgccggccggcgttaccgtggaggtagctgccgacaacacggtaagcgtgaaagggccactcgggacgctgagccagaaagttgactcggacatcaaggtagaggtcggcacgcacacggacgttcacacgggcaaggaagttcccgccgttctggtgacccgtcccaccaaccagccccgccaccgttcgctgcacgggctgtaccgcgcgctgatcaacaacatggttgtcggcgtgtcgaaaggctatgaaatcaaacaggaactcgtcggcgtcggcttcaaggccgaggtcaagggccaggtgctcgaaatgagcctcggctactcgcacgacacgcatttcctgctgcccaaggaggtgaccgccacggccgttaccgagaaaaagggcaacccgatcgtaaccttcaagtcgatcgacaagcagctcatcggccaggttgccgcgaagctccgttcgctgcgcaagccggagccgtacaagggcaagggtatcaagttcgtcggcgagcagatccgtcgcaaggccggtaaatcagcaggtgctaaatagtaaatagtctgaagttatgtcattgaacaagatagaaagaagagagaggatcaagatgcgtatccgcaagatcgtgagcggaacgccttcacagcctcgcatgactgtatatcgtagcaacaagcagatctacgtacagtttatcgacgacctcgcaggtgttaccctggctacggcttcctcgctggacaaggaggttgcggaagcagccgccggcaagaacaagtgcgaagtcgccgccctggtaggcaagctggccgccgagcgcgccgttgccaaaggcatcagcgaagtagccttcgaccgcaacggctacctgtatcacggaagagttaaacagctggccgaagcagcacgcgaaggcggacttaaattctaagcgattatgtcaaataccaacataaagaaagtacgcacgagcgatctcgaactcaaggaccgtctcgtcagcatccagcgcgttaccaaggttacgaagggtggccgcacgttcagtttctcggccatcgtcgtcgtcggcaacgaagacggcgtcgtgggctacggcctgggtaaggcatcggaggttcagtcggccatcgccaagggcgtggaggacgcaaagaagaacctggtgaagattccggttatcaacggtacgatcccccacaagcaggagtcgcgttacagcggttcgctcgtgatgattcgtccggccgctcccggtacgggtgtcatcgccggcggtgccatgcgtgccgttctggagtcggtgggcatcaagaacgtgcttgccaaaagcaagggctcttcgaatccccacaacctggtgaaggcgaccatcggcgcactgtgcgagctgcgcgatgcccacagcatcgcccgcgtgcgcggtatctcgatggacaaggtgtttaacggttaattctcaagaagaacatggcaagattgaaaatcacccaggtcaaaagccgcatcggctccacggagcgtcagtgcaagaaccttgacgcgctgggtctgaaaaggatcaacgcgagcgtcgagcacgacgactcggtgatcataaaaggtatgattgcgcgcgtgaagcacctcgtgaaggtcgaggaagtagcccccgccaagaaggctgcccccaaggccaagaaagccgaggtcaaggaggaggctgcacaggccgcagaataagtttaacagctaacggactataacaatggaactcaataatctcaaacccgcaaagggttcaacgcatcacgataaacggatcggccgcggtgcaggttcgggccacggcggcacggctacccgtggacacaagggtgcacagtcgcgttcgggttactcgcgcaagctcggcttcgagggtggccagatgccgcttcagcgtcgcctccccaagttcggtttcacgaatctgaaacgagttgaattcaaggccatcaacctctcgacgctcgaggagctggcagccaagaaatcgctcacggaggttacggtcgacacgctcatcgccgcaggtttcatctcgtcgaacgacaaggtgaagatcctgggcaacggcacgatttcgaaggcgctcgccgtcaaggcgcatgcgttctcgaagagcgccgaggcggccatcacggcagccaggggcagcgtcgaaaaactgtaagcaaccttagaacccaaaaattatgaatcagtatctcgttgttggtgtcgtctttttggtggtaatcgctcttttggcgaccaacaagaaattggtagaaacgctcaagaatatctacaagatcgaggagcttcgcaagcgtgtcatttacacgatcgggcttctgctggtctaccgcttgggtagtttcgtcgtgattccgggcatcaaccccaacgccctgggcgagggttcggcgtatgccagccagctggaaggcaacggacttctgggtctgttggacgtcttctccggcggtgcgttcggcaacgccgctattttcgcgctcggagtcatgccgtacatcaccgcctcgatcatcatccagctcatgggtatgatggttccgtatttccagaaaatgcagaaggagggtgagagcggccgccgcaagatgaaccagtggacacgcttcctgacgatcggcgtgctgatcctgcaaggtccggcgtacatcgccaacctgtaccatcagatgcccactgcgttcgtttacggcaattcgttcggcttcgttgcctatgcgacgacgatcctgatcgccggaaccatgttcatcatgtggctgggcgagaagatcaccgacaagggtatcggtaacggtatctcgctgatcattatgatcggtatcgtggcacgtctcccgcacgcgctgttggccgaggtcaacgcccgcttccagactgcctcgggtagcgccatcatgctgatcctcgagctggtgctgctgttccttgtcttcatggcaacgatcgctctggtacaggcggtccgcaaggtccctgtacagtatgcaaagcgtatcgtcggtaacaaacagtacggcggcgtacgtcagtacattccgctgaagatgaatgccgcgaatgtgatgcctatcatcttcgcgcaggctctgatgtttattccggcgctgttctccggtacggccttcgcggctgctttcagctcgatgaccggtttctggtacaacttcacgcttgcagtgctggtaatcgccttcacctacttctacacggcgattatcatcaaccctcaaatgatggccgatgacatgaagcgaaacggcggctttatcccgggagtgaaaccgggtaagcagaccgtgaactacatcgacaccatcatgacgcgtatcacccttccgggttcgttcttcctggcgatcgtggcgatcctgcccgcgctggcgatgaagttcctgggcatccagcagtcgttcgcctacttctacggaggtacgtcgctgctgatcatggtcggtgtggtactcgacactctgaagcagatcgagagctacctgctgatgcgccattacgatggtctgatgaagaccggacgtattcagggtcgtcattaggagtttttccgaagagttcttaagcgaagaaatgatctatttaaagacagacgaggagatagagctgctccgggagaacaacatcctggtgtcggagacgctggcggaagtgggtcgccacatccgtccgggcgtcaccaccaaggagttggattcgattgccgaggatttcatccgcgcgcacggagcagttcccgccttcctcgggtatcagggatttcccgcttcgttgtgtatatcggtaaacgaacaggtggttcacggtatcccatcctcgaaatgcgttctcaaagagggcgacatcgtttcggtcgattgcggtacgtttatgaaggggtttgttggtgattcggcatatacgtttgccgttggcgaggttgccggggaagttaggcagctgatggacgtcaccaaagaggctctttataaaggtacggcgcaggccaaagccggcaaccgcgtaggcgacgtgtcggcagccgtgcaggagtacgccgaaagtttcggctacggagtcgtgcgcgaactggagggacacggactgggtcggaaaatgcacgaagaccccggtgttcccaattacggcgcacgcggcagaggaccgctcctgaaggagggcatggtcatctgcatcgaacccatgatcaacatggggaccaaagcggtggttttcgaacgggatggctggacggtccgtacgcgggaccacaaaccggcggcgcactacgagttcgccgttgcggtccgcaaatcgggacccgatgtcctgacggacttcagtatcatcgaaaaggcaataaacaattaagactctatggcaaaacaaactgctattgaaagggacgggacgattatcgaggcgctgtccaacgcgatgttccgcgtcgaactggacaacggccacattctcacggcccatatctcgggaaagatgcgtatgcactacatcaagatccttcccggagataaagtaaaagtggagatgacgccctatgaccttacgaagggacgtatatctttccggtacaaataattagattgcttgaaaatcatgaaagttaaagcatccatcaagaaaagaagcgaggattgcaagattgtgaagcgtaaaggcaaactttatgtcatttgcaaaaagaatcccaagtttaaaatgcgccaggggtaatgttttttaaacaagtcaaaaaagaaaaagaatttatatggcacgtatagtcggtgtagatttaccgaaaaacaaaagaggcgagatcggcctgacctatatctacggtatcggtcgttcgacggctcgtaagattctcgagaccgctggcatcagctacgatctcaaagtacaggattggtcggacgaccagatcggtgcgatccgttcgacgatcgccgacctgggtctgaaagtcgagggcgaatgccgttcgatggtccagctgaacatcaagcgcctgatggacatcggctgctaccgcggcatccgtcaccgtctgggtcttcccgtccgcggtcagtcgaccaagaacaacgcgcgtacccgcaagggccgcaagaagactgtcgcaaacaagaaaaaggcaacgaagtaatctttagagaattatggcaaagaaaactggaacagttaagaaaaaggttgttaaggtcggtgcgctgggcaatgtctatgtacactccactttcaacaacgtaatcatcaccatcaccaacgaggtgggcgatgtcatcagctggtcgtcggccggcaagatgggcttccgtggttcgaagaagaatactccgtatgcagcacagaccgcttcggcggattgcgccaaggtcgcttacgacatgggcctgcgcaaggtgaaggtttatgtgaagggtccgggtgcaggtcgcgagtcggccgtgcgcacgatccacggcgccggtatcgaggtgatggagatcatcgacgttacgccgctgccgcacaacggctgccgtgctcctaaccgccgccgcgtataattcaggcacaggttaaggataatttcaaggttttaaaaaaagacagaacaatgggaaaatatataggacctaaatcgaaaatcgcccgtaaattcggcgaagctatctatggtgcggataaggtgctcgaaaagcgcaactatcctcccggacagcatggtctggcgcgcaagcgcaagaaagtgtcggagtacggcacgcagttgagcgagaagcagaaggcgaagtacacgtacggcctgctggagaagcagttctcgcgcacctacgagcaggctgcccgcatgggcggtatcacgggtgagaacctgctgaagctgctggagtgccgcctggacaacgtcgtttaccgcttgggtatcgccccgacgcgtgcggctgcccgccagctcgtttcgcactgccacatctgcgtgaacggcagcgtcgtgaacatcccctcgtactcgctgcgcgcgggtgacgtggtgtcggttcgcgagaagtcgaagagtctggaagtgatctcggcatccctggccggctcgtcgaagagccgctacgcctggttggagtgggacaacgcctcgatgagcggccgtttcctccagaaacccgagcgtgaggagatccccgagaacatcaaggagcagctcatcgtcgagttgtactcgaagtagtaatcaaaacaaattcacctattatggcaatattagcattccagaaacctgagaaggttattatgcttgaatccacttcgtcgttcgggaagttcgaattccgaccgctggagcccggattcggtatgactgtcggtaacgctttgcgtcgtattctgctctcttcgctggagggttacgcaatcacgactgtcaaggtagccggtgtcgatcacgagtttgccgctatccccggtgtgatggaggatatgttgaacatcatcctcaatctgaagcaggttcgttttatccgcacagtcgataatcaggatgccgaaaaagtatccattaacgttgcgggtgttacggagctgactgccggatatatctcgaattacctgtcgttcttcaaggtcctcaatcccgacctggtgatctgtcacctggccccgggaacgaagatgcagatgacgctcacgatcggcaaaggccgcggctacgtgcctgccgaggagaacgctcccgctgaaagcgagttcggaacgcttccgatcgactcgatcttcacgcccatcaagaacgtgaagtactcgatcgaaaactaccgcgtcgagcagaagaccgactacgagaagctgaatttggaaattaccaccgacgggtcgattcaccccaaagaggctctgaaagaggccgcaaaaattctcatccagcacttcatgctcttctccgacgagaagatcaccgtcaacatggaagacacgaacggtgccgaggaattcgatgaggatgtactccacatgcgtcagctgctgaagacgaagctctcggatcaggacctttcggtccgcgccctgaactgcctgaaggccgccgatgtcgatacggtgggggacctcgtgaagctgaaccgcaacgacctgctgaagttccgcaacttcggcaagaagtcgctgacggagctggacgagttgctgacctcgctcaacctgaagttcggtatggacgtatcaatctacaaacttgacaaagattaattatgagacacaataagaatttcaaccacctgggccgtcaggcaggccaccgcaaggccatgctgtcgaacatggccacgtcgctgatcctgcacaaacgcatcgaaacgacggttgccaaggccaaggccgttcagcgtttcgtggagcctctggtcaccaagtcgaaggaggacacgacgcactcgcgccgtatcgtattctcgtacctgaaacagaaagaggccgttacggagctgttccgtacgatcgcgccgaagatttcggagcgtccgggcggttacacccgcatcctgaagaccggtttccgtctgggcgatgctgccgacatgtgcatcatcgagttcgttgacttcaacgagccttacacgctgggtatcgctcccgcagctgcttcggaggcaaaaccgaagacgcgccgttcgcgcaagtcggccgccaaggctaccgacgccgtcgaggaggctaccgtcgtcgagggcgaggctaaaaaggccgcacccaagaaggctgccgccccgaagaagcccgcagcgccgaaggccgcttcggccaaggctgcggctccgaaggttgcgaagaagaccaatgtgggcaaaaaaatgtagccttttggatttgtaagcggatattcccgcacatcctaaacaaaacccgaatgggacgtccgtcaggactacccatccgggttttttattacgatgcacgaaaaatcggtttcggcttatgtcgtgcttgaagcctttcgcctgcaatcgaaaatcgccgcaacaaaaacagggactgtgtaaacagcccctgtttaatttacgatccgtttggcgctattggaaatgatagagaaacacgaccgtcgcatcgagggccgttttggggctgtccttgatttcgagcgacaccttgatctccgccttggcgatgccgcggaggtttgcgagcgacaccagcgaggcgcgcagccggactgcgtcgcctgccagcacaggccggttgaagcgcagtttctcgatgccgtagttgaccagcatcttcacgttgttgacctccagaatttgtccccagaggtaggggagcaccgaaaggttcaggtagccgtgcgcaatggtcgatttataagggctttccgtccgggcgcgctccgtgtccacgtgaatccactggtggtcgagcgtggcgtcggcgaaaaggtcgatctgctcctgcgtgatcgtcaggtagtcggaaacacccagctcctgacctatgtgctgggcgaattcgttgaaattgttgatgattaaccggctcatgtcgttttgttatgtgctgtaaatatacgaaaaaagtttgttccggccgcattcggcccgtttttgaacatctttgcggagggcatggaaatccccggccgtcgacgggccggggattttttaacgggtgcgggattacagattgatctcgatccggggatgatccttctcggagtaccacatgttttcgacggtgacgtcgagcggcttgtcacgtcctacggtggtcatcagcgtcgagaacggcttgagcacgacgggattctgccccgggaagcggaggacgtactccaccgaactgccgttcgtgaggcttaccgtgcggcggccgttgctcgggtcggtgtggagcacctttgtccggaccgatgccgtgaagaggtccttcagcagctgttcgtcgcccgctatcgtgccgaacgaataggccagcgtgcggcgcgcttcgagcgcctcgcgcagcgcttcgagcgagttgttccgggcgaagatcagcgtcatgttgcggctgtggccctgaagccggtaggtctcggccgtcgcatcgtggatgtcggtattcgccgacacgaacagtttgcgggcgtgggcgcgtgcgatggctttggggtagaactctgcgccgttcataatttcgatgccgtcgatcagcccttcgccgtaggctttgacttcgaactcggggtgttcgaggctcttgcgccgccagcccggatggttgtgcatcaccagcgccccctgcgccttggcgttgcggagcgattgcagggcgtcggtggcgtagagggagttgttgtccgtggtgaaaagggcgttgtagtggccgtaggcgatcggttcgcgggtgatctcggcgccgggaatgatcgtcagaccgtattttcgggcggtctcccgggccagtttcaccgggaggttcagatccgactggatgccccgttcgtcggcgctcctccggatgatgttgttgtttatggcctccgtaccttcgggaacgtagcctttgaggaagttcagcatcttgccttcgtggcggcggtattccacgtgttcggtgatcgccagcacgtccaggccgtcgtaccacgcttcgcggacgcggaattcgggcgtgcagtcgccgtcggagtagaccgagtgggtgtgcaggtcggctttgtagacgttgtagccgttcacctcgggcagtatgaattccgcgcgctgtgcggcgatgcgcccggtgtggcgcgtgatgtcgggattgtaggcgtcggtgtagtagccttgcgcgcttgcggcgcatgccgccgagagtgcggcggcgagaaacagcagttttttcatggtgtcgtagttatggttgggaaatccgggtcggataaagagacagaggcccctgcaaggggcctctgtccgtaattgtacgctgtcgcggtattacttcgagaaccccttgccgatggcgaggaagtcctctgccttgagggctgcgccgccgatcaggccgccgtccacgtcctccttggcgaagatttcggcggcgttcgagggcttgcacgaaccgccgtagaggatcgccgtctcctgtgccgctgcgccgaacttggcggcgagcacctggcggatgtaggcgtggatctcctgtgcctgctcggccgaagcggtcttgcccgtaccgatggcccaaaccggctcgtaagcgatcacgaggttcttgtactgctcctcggtgaggttgtaaaccacctcttcgatctgggccttcaccacgtcgaagtgtttgccggcctcgcgctcgtcgaggttctcgccgacgcagtagatggggatcagcccgtttgcataggcctgcgccatcttcttgttgagcgtcgcggaggtctcgccgtagtactggcggcgctccgagtggccgaggatcacgtatttgcatcccagcgccgcgatcatcgaggcagcgatctcacccgtgtaggcgcctttggcttcggtggcgcagtcctgcgcgccgagtgcgacgtccgaacccttcagggcctcggcaaccatcgccagatgggtgaacggcgggcagacgatgaagttcacgcacgagcaaacctctccgcggcctgccacgacgcctttggccagttcgacaccttcggcgggaagcgtgttcatcttccagttgccggcaacaattttctttctcatagttgtaattcttttttatgttaataagtctatcctttgtttagcaagaatcccggtttcgcatgcgcggcgttccgccgcgtttgcaattctaccctcccctaaatcccctcctcggaggggactttatcgcgatgtttccgggttttgggccgaagtcgcggcctgccgatccgcttcgggcgaatcgaaaaatttctgaccggggcgttccgtaatttttaattcttaatttttcatttttaatttgcgtcgcaccagcctttcacctcgtcgatcgagggggctttcagtccgagcttgttcttcttgttgaatccgcacaggtcgttgaagaacttgccgggggcgagtttgcggagcgactcgacggtgaggtaccccatcttctgaatcaccggaacccactcttcgggaacgccgatggcggtgtaggcctctgcgggatcgttcacgaccttcttctcggggcgcatctgcgggaagaacagcacgtcctggatcgaggactggtcggtcataaacatcgtcagccggtcgatgccgatgcccattcccgagcaggtcggcatgccgtattccagtgcgcgcacgaagtccatgtcgatgaacatggcctcgtcgtcgcccttctccgagagacgcagctgctcctggaaacgctccagctggtcgatcgggtcgttcagctccgaataggcgttgcacagctccttgccgttgacgaacagttcgaaacgctccgtcaggtcggggttcgagcggtgacgcttgcacagcggcgacatctcgcgcgggtagtccgtgatgaaggtgggctggatcagctcctcctcgcagtactgcccgaagatggcgtcgatcagcttgcccttgccgaaggtctcgtcgacctcgacgttcaactgcttgcacgcttcgcgcagctcctcctccgagcggcccgtgatgtcgtagccggtcttttcgcggatggcgtcggtcatcgtcagacggcggaacggggccttgaatgagatcggcttgccgtcgatcgtcagctccgtcgtgccgttcacggccatggccacccgttcgagcatctgctcggtgaactccatcatccagaggtagtccttgtaggccacgtaaatctccatgcacgtgaactcggggttgtgcgtgcggtccatgccctcgttgcggaagttcttgccgaactcgtagacgccgtcgaatccgccgacgatcagtttcttgaggtaaagttccgtggcgatgcgcaggtagaggtcgatgtcgagcgagttgtggtgggtgatgaacggacgcgccgatgcgccgccggggatgggctggaggatcggggtctcgacctcgatgtagccccgttcgttgaagaactcgcgcatcgtggccatgatcctggcgcggcggacgaaggtctccttcacctgcgggttgacgatcaggtccaaataccgctggcggtagcgcacctccgggtcggtgaaggcatcgaacgtcttgccgtccttctccttgacgacgggcagcgggcggatcgacttcgacagcacggtgaacttacggcagtgcaccgacagttcgccggtgttggtatggaaggcgaatccctccacgccgatgaagtcgccgatgtcgagcagtttcttgaaaaccgtgttgtagagtgtcggatcgccttcggggcagatgtcgtcgcggcggatgtagacctgaatgcggcccgtgtggtcctgtagctcgaagaacgaggcgctgcccatgatgcggcgcgacatgatgcggccggcgatgcggacgtcctggaaattcttcttcgcgtcgtcgtagttatcggcgatttcgcgcgccgtggccgtcacttcgtaacgggcggcggggtagggttcgatgcccagattgcgcaacgccgtgagcgactgcctgcgaagctgttcctgttcgctgagttcgattgccatatcgtgtgtttttgatgtatcgttttatatccgtgcaaaattagtgaaaaaagggcaaagtagcaactctttccgcaatcggctgcaaccgcggcgcggcggcccgggaaaaccgggcgcgggcggttgttgtttatttggtttttatcgctatatttgtttgtgtgtctgactaaaacctgaattatgaaacaactctccattctctttcgcggcacgctgggtttccccttcccggtttcaggggcgttcgccctgtgcctgctgctgctcgcctcgtgcggcggcgacgactcttcggacgagagctatgccgccattgaatccgcatcgttcaccttcgacgaaacgactccggcgaacaatgcggtccgtgtgatcgccaacaccgggtggcaggttttctggacgcccgagtcggctgccgtccgggtggagccggcctcgggttccggtaacggagtgttctacgtgtgggacatgcccaagggcgcttccgttcaggtgggcgtgcgcgccgcctcgggcaagacctcgggcaagccggtcaccgtgacccgtgccgccgatgccgtcggggtgacgctctcggtcgctcccgccgaactgctctacgatccggcctcgcccgcatcgaacgtcgtcaccgtgacgacgaacgcttcgtggaaggcggcatgtcccaattccgcgctgaagttctcgcccgcctcgggtacgggcagcgccacgatcaccattgccgacgcgcccgcggggcagcgcaccacgctgaccgttacggccggagaaggctccggcgccaagactgcaacctgcgtgatcgtgcgcaatccggagacccccgccgagacggttttcagcctcgatttcggcaacggagcgggcggcgtctgggcgggcgcgaatcaggagtggaaaacccagaccggcacgggagcctcgacggtgacctatgccgtgaacaatgtccgtatcaacaatgacaattacggttcggcgggcaaatactccggggcttcgggaaaagcctacgccaagatgttctacaacgcgtcgacggactatttcgtgatccaggacatctcgctgcctgcggggcagacgaatttcaccctcgctttcggtgcgatcttcccggcggatgacgtttcgctgacggtgagcgccgacggtgcggtctggaaaccgctcgtctatacgggcgcgtcggcctacaacacgtggaccgggacgacggtgggcttcacgctcgcgcagcctgttccgaaactgtggattcgccttgcgccgacgggtacggagcgcgcctacggactgaatttcgacgacatccggctcacgacgggcggcggcggtcagcaggtcgacctcgggacgggtgcgggccttcgctgggccgagcttccctccaatttcgaaacgccctcctccgaccagttcgtgcatacgacctggaccacgaccgtttcgggcggcaagcgggtgcgcaactacacctattgttacgataagcgccgccacaatccggtttgggtggcctatccgcatcatcgctgctacctcgaaggttcggggcgctccgacgagccgtgggcggcggacccggcgcttccggaaacgcagcaggcgaagatctacccttcgtcggcaggcgacgtttaccagtattgggtcgccgatctggtgaccggccgttacggcagcggctattggtcgcgcgggcacctctgcatgtcgcgcgagcggcccggtaaggggttggaaatcaacatgcagaccttctggccgaccaacattgcgccgcaggccgccgagccgagtcccttcgggaagatctgggggaatatcgaggaggcgatttcaggcggcgcgattcccgccgacacgctttacatcgtggccggatgttattacgaaaacgacggctgggttcagaaagacgcctcgaacaacggtgcgttgagttcgctttcgaaggattgcgtcatgccgacgcaccagttcaagatggccgtgcgcaagaagacggtccaggtgggcaaacccattcaggagtgtacggccgacgaactggagaccatcgccttctgggtcgaaactctgacgacgagcgccgccacggagaagtcgcagttggggcagtttatcgttcccatatcggagatcgagtcgaagatgcggatgaaattctttccggggattcccgacgcggccaagagccgggccggcacgctgtcggcgtggtattgacggaaaaggagctgctattgcagctccttttttgggcgggacagtctccggtaggtccagaaggccgccagtcccagcgcgatgccgaccgccgtaccccacacgaggtccatcgggtagtgtttgcccagatagatgcgtgagtagcagatcaggagggtggagagaaccatcagtcccgtgaaccaccgccggcggatgaccgaggccgacagcacggccagcgtgacaatgaccgccgcatgggccgagacggtcccgaagcggccgctcacggcctcgacggggacgtgtacgacccagtcgtgcgtaacgcccgcggcggcgagcgagtcgggcgtcagccagcgcagcttgcgcagcgagtcgggagcgatctccagcccttcgagcgcgggggtgaacatcggccgccagcgcggttcgaagtcgggcagcagcccgcccagcacgccgttgtgcttgaagattcccgaaatcatgtccgagaggaccagcgcggcgatcatcagcgccgtgaagaggatgacgttgcgccatccgtcgcggcgccacacgagccagaggatcagcgcgtagagcggcagccacatcgtcgtgcccgagacggtcagcatcagacggtccatgaaggggcctccgtcgaagttcagagctaaaaagaggttatggtcgcaattcataagctaaaagttgagtgaatgtttggccgacaattcggtcgcgtgcgacaagcccccggcaaggcgagggtttgggggtgggtccaatttgtaaacgccgctgcaagcggcgaaaacgacattccgggatgcatgagcgggtccatatacgtatcagaactggaaatagataaacggctgtatgtcgctggatttgatctgcatgacgcaccagatcatcgccgcggccatcaggacctgcagaaccagcggcgcatggaccacgatccgctgcgcgacggcgtcgacggccgacggcagcaggtgcaggatgtaacccgcggcgatcagcgcgaagacggcggcgtagcccgtcacgacctgcgggatcatcgcggcgttgaagttttcgaaaatctggtgcagcatcagcgagacggtctgcatcgactcggcgcggaacatcagccaccccaggcagacgatgttgaacgtcaggagcatgcccgccgcgcggctccaccagtgcatctgcgccccggtggccttggcgcccggaacgagggccatccagagcttgtgcagcgccagggccgcgccgtgcagtccgccccagaggatgaaacgcaccgccgcgccgtgccacagtccgcccagcagcatcgtcaggagcaggttgccgtaggtccggatgcggcccttgcggttgccgcccagcgaaatgtagaggtagtcgcgcagccacgtcgagagcgagatgtgccaccgccgccagaactcggtgatcgtcgccgacttgtagggtgcgtcgaagttcttcgggaagcggaagcccagcagcagggcgatgccgatggccatgtccgaatagcccgagaagtcgcagtagatttgcagcgcatagccgtagatgcccattaggcactcgaatcccgagtagagcagcggttcgtcgaagatgcggtcgacgaagttgagcgagatgtagtccgaaatgatcgcctttttgaacaggcccgtgaggatcaggaagacgcccgtgccgaacatctcgcgcgtgaccacgaccgggttctgccggatctgcgggatgaaatcccgggcgcggacgatcgggccggccaccagctgcggaaagaacgacaggtaaaagagatagtcgagccagttagacaaaggcttcagctggccgcggtaaatgtctatggtgtagctcatcgactggaaaacgaagaacgagatgccgaccgggaggaagatgttctggaattgcaggaagccttgtccgaacagctggttggagatgtcgatgaggaagttcgtgtacttgaaataccccagcatgccgaggttcaccgcgacgctcaataccaccagccagcgtttcgtccaccggaagcgcgcccggtagatgccccgggcgatcaagaagtcgctcgccgcggcgaagacgagcagcaggaaatagatgccgctcgacttgtagtagaaatagagcgagaaggcgatgacgtagacgatgcgggccatcggcgcgcggcggaagacgctgtaaacgagcaggaatcccgcgaagaggaacaggaacagcccgctgctgaaaatcagcggcgaggaggcgtcgtaggcaaacagcgcctggagcctgtcggtgatgccgtccgttgcgggaaaggtcattgcgcgcgcgggttaaggggtgcggaggatggggccgggaggatgctgcggtcgacggcggccctgcgcgccgagtcgaggacggcctgcgccgccgtgcggcgcaggctggcgatccgctgctcggtgtagacttccgagactccggcgttgatggcgtcgaacagcgcccatgccacgcggcgccctccggcgtagttgatgtgggtgtagtccttgcccgcccagccgttcttgacgaactgttccatgccgcccagggcgcgcatggcgtcgcacgtgggccagaaggccgcgcccgtgttccgcgccgcacggcgctggcagtcgagcatgtgtgggatggcgtccatcggttcgaatccggcgtcggtcttcaccgaacggtcgctgacgcccagcacgagcaccgccgcccccgggaagcactggcggacataggcgatcatcttctcgatctgtccggcgtagttggtgtagttcttcacgcccggctgcatgatgttcagcccgtactggagcaccaccagatcgtagcccagcatggcgttgatctgggcgttgaccgacgggttggtccagaacatcgcctgcccgttgttgctgcgcacggagtagttgtcgaccacgacgccccggccttcgaaaaccgctccgtagccgacgaagtcctccgcgccggagagcaccttgaaggcgagcgagcggacacggggggccgagacggcgatctgccgcacggcgtcatcgcccgcgatgtcgaattcgcggcgctgggcgtcgttgagcgtcacctcgacgcggctgtcgcggggcgagaggaagaagacgcgcgccgtggtgcacgaatcgaggcgtttgcggtagtcggtgctctcccagcgggtcgaagccccggccgcaggctggctcacccagcccgagacgtagaaattctcgcgcaggcgcgcgggcgcggctttgcgctgcatgatgttgtaggtcgtccagcccttcgactgggttttgaccgtgcgccggaacgccgtcagcggcgaggccatcggggcgaatcccgcgccgccgcccgagtaggccgactggagccgttcgcgcaggtcggccgtgaggatgtcgccctcgacgaacgagtcgcccaggaaggcgatgcgcaccgggcgcggagcgttgagcagcgtgtcgcagaaggcctggatgcgtccgctgtcgctgaaatcctcgatcggggtcagcgtcgcgacgaagcgcgccgagtcgggcacggcgcgttcgcggcgggccgtgtcctgcgcgaggagccattcgtaggtgatctgcacctcgcgcggggtggtgtcggcctcgatgcgttcggcgacggcggccatgtcgatatggaactcctcttcgtcgaagagcgccggctcggcggcgggttcggccgcttcggcgtcgtcgaacgaaaggaggtccgagaggatgttggcgcggcggagtttcacgcccccgacgctttgcggagggatgaaacttacggccacgagcactgcgatgagcgctgcggccgccagccagctgtggtgggtgtaatcttttccgggggtgttcatcggtgggtcagtcgcgccgtccgaggatcaggaagacgtagtaaagcaccgacgcgatggcgctcaacgccgctacgaggtaagtgcgggccgcccacgagagggcctctttggcctgcgcgagctgtgctccctgcatcgtgcggctggtctggagccactccacggcgcgggccgaggcgttgtactcgacgggcagcgtgacgagcgagaagagggccgacatggcgatcatgcccacgccgatccagcacagcagttcgttctgcgtcgaggcgaggatgacgagacccaggatgatgacccacgtggcggccgtcgaggcgaactgcacgacgggaaccagctgcgaacgcagcgtcagcggggcgtaaccgcgggcgtgctgcacggcgtggccgcactcgtgggccgccacggccgcggcggcgacgctcgacgacgagtagaccgagtcgctcaggttgacggtcatcgtctgcgggttgaaatggtcggtgaggtgtccgcccacgtgcgtcaccttcacgttgtggatgttgttgtcgcgcagcatcttctcggcgacctcggcgccggtcagcccgccggggaactgcaccttcgaatacttcttgaacaccgattgcaggcgcgcctgcacgatgaacccgatgacgccgatggcgatgatcaggacgaacatgcccatcgtcgcggcgtcgtagcgcgcggcgtgcggctctgcatagtaacctgcctggagcagggcaatcataggaaatgtcatagcgttgtctgttttgttttccggtgcgtgtaatacgctcccgcctgctgcgagggcatcagcaccatatcattaacgttcatatgggcgggtaattgtgccgcccatgcgattgcttccgcaatgtcggcgccggtgagcggttcgacgccgtcgtaaaccgcgtcagcgcgcttcttgtcgccgtggaaacgcacttcggaaaattcggtctcgaccattcccgggcggatctccgtcaccttgatcccggccgaaagtaggtcggcgcgcatcgactgcgaaatggcgtgcacggcgtgtttcgaggcgcagtagaccgcgccgttctcgtaggcctcggtcccggcgatcgagccgatgttgaagatgtgcccgcggcccgcggcgaccatcttgggcgcgatgacgcgcgtgacgtagagaagccccttgacgttggtgtcgatcatggcgtcccagtcgcgcgtgtcgcccaggtcgatgtgctccagtccggcggcgagacccgcgttgttgaccagcaggtcgatgttttcgagcggagagaggttgcggcgcacctcctcctcggagcgcacgtcgaaggcgagcgtcgtgcagcggccgcccgccgcttcgatctccgcgcgcagcgtcgcgagccggtcggcccggcggcccgtggcgatgacggcgtatccctcctttgccagccggagcgccgtggcgcgtccgatgcccgaagtggctcccgtaatcaatgcctgtttttgcatacgaaaaacgtttgttttccgcaaagatacaaaaaagtaggatggctgcaaaacagaattgcgggcgcgtttgtaaaaccttccggctgataaaaagtgtcgttacgataccggaaatacgaaatttatatgttactttgtacaaattttcgacaagacagcgcaccgtgaatctctcctttttcatcgcacgccgcatggcgcagcccgcgcccgggaacaagcccggggtgatggagcgtatcgccgtggtgtcggtggcgctggggatggcggtgatgatcctcgcgatggccgtcatcatgggcttcaaacgcgaggtggcgcgcaagatgacggggtttgcggctcacgtcgcggtgaccgacataaggggcgtgaacgcgctcgatgcgcagcccgtgcgccgcagcgcgcatgtcgaggagctgatccgccggaccgacgggttcgtggcgatggctccctatgccgtcaaggggggcatcgtccgcacggccgacgccgtgggcgaggtgatgctcaagggtgtcgaggcggattacgactggtcgtatttccgcgaatggctcgtcgcgggggagctgccccgtgtgggcggcgaggtccgcacgaaggacatcctgctgtcgcgcacgctggccgacaaactgctgctgggcgtgggcgacaaggtcgagatgctgttcgtcgagccgggcgaaatgccgcgccgcgaccgtttcaaggtggcgggcgtctacgagtcggggatggaggagatggacggcgtggtggtcgtgacggacatccgcaacgtgcagcggctctcggagtggggaccggacgagatttcgggctacgagatcctgacgcgctcgctggccggcgccgacacgttcgcccggacgctgggccggacgctgttgtacgatgatgccgaagattccgaaaacctcgccgtgacgagcgtccgggagcggtacgccaatattttcgattggctgaaggcccacgatgtgaatgccgcggtggtgatcgtcatcatgctcgtggtggccttcttcaacatgacctcggcgctgctgatcctcgtgctggagcggacgcggatgatcggtctgctgaaagccttcgggatgcgcaacggctgtctgcggcgcatcttcctctggcgggcggcgctggtgaccctgcgggggctggcgtggggcaatgccgccggactggggttgtgcctcgtgcagaaatggacgcatctggtgaagctcagctccgagggatacctgctctcggaggtgcccgtgtcgctgggttggggctggtggctggcgctcaacgcggggttcgtcgccgcgatcgtcgccctgctggtgatcccgacggccgtggtctccaccgtgaagcccgaagaaacgattagatacgaatgaaaccatacaatacagatcagaccaaaaaggaggaggtgcgcgagatgttcgacaacatcgcgccaaagtacgacctgctgaaccatacgctttcgatgagcatcgaccgcgtgtggcgccgccgcgtggtcggcgaggtgcgccgcgcaaagcccggccgcatcctggacgtggcgaccggaacgggcgacctggcgatcgccatggcccgccgcatccgcgacgtgcaggtgctcggggtggacctttcggagcagatgctcgccgtggcacgccgcaagatcgaggcccgggggttggacgggcgcatcgtcctcgaccggggcgatgccgagcgtctcgccgtggccgacgcgtcggtcgatgtggcgaccgtggcgttcggggtgcgcaacttcggagacctcggggccgggctgcgcgaactggcccgcacaataaaacccgggggcaaagtcgttatcctggagttttcgcgtccccgcaaccgggtgttccgggcgttgtacgaattttattcctacaaaatcctgccccgcatcggcgggctggtgtcgcgcgacaagcgggcctacgagtatcttccggcctcggtcggggagtttcccgcgccggaggagttcatggcgatgatggcccgggcgggatttcgcaactgccgggcgcggagccagagtttcggtatcgcacaaatatatataggagaaagatgaagatgatacaacgttattcggtgtacgtattgctgctggcggtcgcggtgtcgctctcttcgtgccgccgcgccgtggagaaggcccggcgcaacatccgcttcgagggcattgaaagggtcgagcgtcagggactgacgggcgccgaggtggtcgtgcgggtgatgaacgatacgggttacaagctggtgctcgatgccgcggaaatgggcgtttactatgccggcggccgtgtggggacggtcgtcctgcgcgaggcggtcgaagtgccccgccgtacgacggacagcttccggaccttgtggcaactgaaaatctctgacccgctggcgctctacgtgctggcccggaaggtgaagtcgggcgatctgtcgcaggtcgaggtgtcgtatgccgtggaagggcgcggaggcccggctcccgtgaaaatttcgcgcgaacggatgccgttgtcggattttttgaatacctttggccttacgatagaggacgttaaaaaacagttgaaataatgcgcagattgcttttcctcatgccgattctcctgtgcgcggccgtttccgcgcacgcacagtcgctcgacgccttcaagcagcgtctggcggaacccacgcccggggcgacgcttttcaaccgggcgcaggtcaccgtcaccgagcatgacgacgccgcacgcgccgtggccgacgccgcgcgcgccgggcagcggctctatttcgagggttttcaccgggtctgcgtcttttcggacaacgggcctgcggcgcgcgacggggcttttgccgccaaggcgctgttcgaggagacttatcccgacgtgaaggtttacgtggattacgagattccctatttcatcgtttcggcgggcaactgcctgaccaaggaggaggccatcatgctcaaggggcgtgtgtcggcgaccttcccgaaggcttttctcaagcagctgaagagggagaaatccccgatttccaaccttttggaccaataaaagtccggtttcgaaaaataattcttttttctttgcttttcccgggcgaatatttaactttgcggcgttacggaacaattaacaattaaatgtttaacgccatgaaaaagattgtctcttttgtcatcgtcctggctgccgtcgcaatggtaggctgctgtggaaattcgaacaagaaggctgccgagggcgctgccgccgctgccgctaccgaagcttcggcttgcgcaaactgcgccgagaagtgcgattcgacggctgcatgctgcgccgagaaggccgattcgaccaaggcctgctgcgagaaatcgtgctgcgagaaggccgaggcaaacaagtagtcgccggttaggtttgagagtgagggagattcttcggaatcccccttttttgttgccgcacggaattgccgtgcggttttagattcggcgcggaatgtgtacggggagtggaaaaaatggttgtttttgcatgaaatacccgcaattatgaaagtactgcttatcaacggaagtccccgccgcgaggggaacaccttcatcgcgctttccgaagcggcccgcgcgctcgaagccgagggcgtcggggcggagatcgtctcgatcggaaccaaggccgtgcagggatgcatcgcctgcggaaagtgcgccgaactgggacgctgcgtcttcaacgacgcgctttacaacgaggtccgcgagaaactcgccggggccgacgccctggtggtcggttcgccggtctactatgccgggccgaacgggtcgctgtgcgccctgctggaccggctgttctactcctgttccgaccgcctggcctacaagcctgccgcggcggtggccgtatgccgccggggcggggcgagcgcgacgttcgaccggctgaacaagtatttcacgatttcaaacatgcccgtcgtgtcgtcgcaatactggaacagcgtccacgggaggctgccgggcgaggcggcgcaggacgccgaagggttgcagacgatgcgcgtgctggcccgcaacatggcgcggatgctccgggccggactgctggcttcggaaggccgtcccgaaccggaagagcgggtcgtgacgagttttatccgctgaaaggcccgtccgcagggcggatgaacggaaaaagagcgccgctatttgcagaatcgggaaatattgtgtacttttggggcacctttcggaaagatgcaggagtggttgaactggcccgcctggaaagcgagtaaacccctaaagggtttcaggggttcgaatccccttctttccgcagcatgcgaaaaccgggttgcaagcgatcttgcagcccggtttcttttgcggttcagggtcagtcgacgcgggttttccggccggggtgctccgtctctttctcgcgcacgacggcgagcacttcctcgacgattgcggtcagcgtccacgaggcgttcggcctgcgggcatgcaggcggtcgcacgcgagccggatggcgtcgagcagtttcagcgcgatcaggatgtacggcggcagtttgagtttcgagatgtcgtacttctccttgttgaggtagttcaggaacgtgtcgtaggtcgtgcctaacagatacttgccgaaggtctcgaagaccagtttgaggttacggttggcattttcgcgctcgaagtggaacgatttgagggcttgcgcaatcagaatgcgccatttcagatgttcggaaacgtacatattaagcggattttgatggttgatgggaagccaacagaacctacccggacttactgaaacagcgatgacggatgggatgatgaacgtgtgtttacagaggcattcggagtttcgggaggagtcgtagtcatattggctgtttttgttctttcaaaggggtaatctgaacaaaaatgcagatcggaatttgtgcgggcaactacaaccttaacccttgggtcggtttttgtatcgaaaattgcattcgtataaattcggtattatatggcagctgcaagctgtctcttctccgggcgtttggtgcttgcggaatggccggagaatccgggcgctccgccgcgttccggaccggatggtcggaatggtatgcgcagatgtccggacgggaccggttcgtccggaacagccgctgtccggggacgaaggggcatggcgcaggtgcggcagcgatgcggcatgccgccgggaatggcgaaagggatttctgcgaacgggaagtgacggccgcgatttctgcggaccggaaaggatcgaagggacggatgcggacgccgaagggcggcgcgtccggaggcctttggcgcgggtatggcggcgggcgtcctgccttgccggagcggacgtttagaacggatacccgatggccaggtggaatccgagaccgtccttgaaactggaaatgttgtagtagcccttcttgtccgggttcggatagggggtgtgcaggccgatgccgaggtcggcgcggatgaccaggtaactgatgtcgtagcgcagtccgaagcctgttcccagcgcgatgtcgttcaggaagcctttccatttgagttcggctccgggacgtttggggtctttcttcagcagccagatgtttccggcgtcgaggaagacggctccgttgagccgccccatgatgccgaagcggtattcgatgttggcttccagtttgaagtcgcccgtctggtcgaggtagccgttgcggtcgtccgcgggcgggcggtagctgcccgggccgagcgaccggatggtgaaggcgcggatgctgttggcaccgccgatgtagaactgttcgctgtaaggcatcacctccgaattgccgtaggcgtagcccgcgccgacgaggagacgcgtcgccagccagttgttgcggcggccgatgcggtggtagaacttcacttcgctgacctccttgacgaactgcgaaaaacggttgccgaagaggggctggggctgccgttcgccgaaggcccgcaggatgcccgaaagcaggttgccggccgacgtgacgctgttctgccagtagaagcgccggttgcccgtggcgccgtaggtccgctcgaaggtgtaggtgtagttgatcgagggcacgaactggttgcggaaactcatggcgatggccggattttcgtccatcgtccggtcgaaggagtcggtcgtgtggagcagtttgttgtaggtgagcttgaagaccgtcagcgaatggcggctgtacggggaggtctggaagttgtagcccgccgaaccgctgaaggcgatcagccggaagaagctgggacggttcatcaggtcgacgcccagctggaacgacgtgctccccgggtatttctgctggcgcgtcatgctccggggcagcagcagcctcgggatgtcgaggttggcgttcagccccagttcgtaggagttgagccgcgaggagcgtcccccggaattcttgttgcccgtctgccattcgtaggagccgttcagcttcacggagaggacctcgccgccgcggaagaggttgttgttgctgacccggaaggtgacgcccgggccgatgaagctgttcgatttcgaggtgacgtcggtctccagggccgcctccagcgggtagtcgaaccgggcgtcgatctccacgtcgagcgtgtcggagccgcgcagcgagtcgagcggcgtgacgctcaggttgacggagcggaagatccccagtttgttgaggtcggtctgcgtccggttctgggcgtcgacggtgaagagctgcccgggccggagcgtcagggcgcgggacaggacccgggggcggattttcagcggccgccgggcgatgacggtcgcgtccggcaggcgcagcgtatccgcagggccgggtttgatgttggtcaggcggaccgtgacgtcgcccacgcggtagggcatgagggccgcctgcggaacgttcggccggaggttcaggcgcagggcgacctgccgtcggccggcggtcgtgtcggccaggtactccatgtattcgggacggaaatagtagtagccccggttgcggagcagctgggagatgcgtttgcgttcgagcgtgagcgagtcgaggttgtactgcgccccgacgcgcagcagggaggtggcttgcagactgtcgatcagctgtttcagaccctcgccgacctgcggataggcgatggacgaatagcgccatgcgggtgcgatgccgagcgtgtaccggactttcgccttgcggccgcgtttgcggtagagcagggagtcggcggcgcgggagccgaagtacccgtaattttcgaggacctgctcggcgaccttcgtgcgcagctgcggctgtaccttggagatcagcaccggctgtttggccagccgcttgtagaaccagtatttgaatcctttctccttcggcgtatagaggtggttgtaggcccacagcccgacgggcagcggggtgcggaggtaggggctgtaaagcggattgttcggtgcgaccgacagcggttccttcaccgccgactcggccgccggagtgagcacgacgcccgaatccggctcgatgaggatctttttcacgcccgtatacagcacctcgtcgctccccagccgccgggtggtggagcaggaggccgccagcagcacggcgcagaggggcagaacgatgtttcggatgcgctgcggactcattttttcggttttttggttttgggacgcatcggtttgaacaggtcgcccagccgcgacagtttcttgcggatgacgaaacccacgcctgtttcggtgatctcgccttcgaggatgctctcgtagcccgtgtggcggaagactttcaggtacatgttgtcgcgtttggtgagcatgtattccagcgaaatgtcgtcgatcaggttctccttgaggttctgcgacgggtcggcgtcggtgctgaacttgccgccgatgaccgcccgcacgcggttgttgaagaggtttttcgagagccggtaggagtagtcggtgcgctggccgttggggtcgtcttcgccgtgggagtcgatgccgaaggagaggtccacgcccttgaggttgttctgcgcccattggttcagctccttctggatgaacgtgttgagcggattctcggagctgactttcgcggtcgttcccgggccggtgtaggtgttgtagatcagcaggttcatcgcctggttggcgcgctgctcggccgtcagcgagttcagctggttctgcatggcgaggtcctcgggggccgccaggccgaaactgatcgccaggtcgttgagcgagttgcggatgttgatcgagatgtcgaaattcaccggccgggagtcctgcccgtcggaggagacgttggcccgcacggtctcgacggccgtgatgttgaaggccgggtcggcgatgtcgccgatccattcgacgtagctgtccggcgtgattttgaagattttctgcgagatgacgggcgggttgtagcgcacgcttccgcccgaaagcacgtatttgcccgacaggcggacgtcgcccagcgggttcatcgtgtaggtgaggttgccgccgccccggaggtcgatccggttgctgccgtcggccgagaggtccacggcggcctgcacgtcgttgttgatgtcgacgtttataagcacgtccatgcccccgatgcgtacctcctgcggcgtgtcgtccggggtttgggtgtccagctcgctgaacgagacgaacgtcacgacattctgcgggcgttccttcacgtccatcggcgagtcctgcatgacgtagttgatgtccgtgccgcccagcagggcgacgttgccgcggacgacgagttcgtccacgggacctttggccgtggcgccgaggtcgagataggccttgccgtagaccgccgtgccggccttgcgggccacgtcgacgaactggaaatccgaggcccgcagcgcgaggtcggccgtcatgcgcccgaagtcggcgaggctgacctcgccgccgacggtcagcgcgcttttgttcggggcgtaaaccgcgtattcgtcgaacaggatgcggctgccggcgatgcggatcgtgtccgcggagaggccgaacgacgtgccgatcatcgggacgcggacgtcggtcccggcgaaccgcacgcctccgtcgagtttcggccgctcgggagtgccgcccgcgtggaccctggcctgaaggctgcccgaaaggcggagcaggtcggcgggcaggaagacgttggcccgctgcaaggggaaacccgggacggtcaccgtcaggtcgagcgggctttcgcgcccctcgcggcagtccccctgcacggtcagcacttcggctccgtcgagcgtcaggcgcgcgtcggcgaggtgtccccggtcctgtttgtagaacagcccgaggtcgacgctgccgaaacgctgtttgtcgtaggtcagctccgccaccgagaccccgccccggagggagaggctgtccgccgcgaggttcagcgtcaggttcgcgcccagcacgccgtcgacgggcggggccgaggggaacagccccatcgccggaccgacgttcagtccggcgatgtcgaggcggatgtcgtcgtcgtcaccgccgcccggggtcgtgcggatcgcgaaccgctggtcgccgtgggtcatgtcgaggtcggcctccacgcgcttgtcgaagcggtatgcgaggtagttgcctcgattgaccgtccacggctcgaaaccgaacagcgggtcgggaggcgtcacgctcgcgcggaccaggctgtcggtccacgtcacgtccagcccgaagcggaatccttcgcggccggcgcggttgcgctggtagaggttcgcctgcccggtgttccgcacgaggtggccgtacagtccggcccgggcgatgttgtcgaggttcccgggggcgttcgccagcccgagggcgtattccagccgtttcccgttctggcggatgtcggccgtcacggtgtcgaggaccacgttcccgtaggccagtccctccgtgcgcaggcggatcgaaacgggcagcgagtcgcagttcgccccttcggcgttcagcgcgtcgaaggcgatcttccgggatttcagcaggctgttgaggatgttgtcgggacccgccgagacccgcagggcgaagtcggggagcgcgggtttcaattgctccatgtcgatgctctgcgcgtcgatctgtccggccagcgcccgggcgctccgggtcagcgccgcgatcagcgagtcagcggattggggcgtggagaacgtcagcgacaggtcgccggaagccgcttcggcccgggttgcggccgagtcggtgtgcagcgagacgctcgtcgggcggatgcggtccgtccggtgtttgttccggatttcgatgctgtccagcgcgatgcgggcggcgtaggccccctttccggcggcggatgcggaggcatcgagggcgaacgatccgccgatcggctccgggctgacgcccagcgcggccaggtcgaacccgaagacgctgcccgagaggccgatgcgctgttcgcgttcggtcagcgttccggagacggacagcagcagccggagcgcctcgtcgcggtcggagatccgtcctgaaagacgctggctgtcgagttctgcgtcgagttcgatgcccccgaagtcgcgtccgccgaactccgcgcggtcgatctgcgcccggaggctcgtccgggtccggggcagcagcgggtcgaagcccgtgccgcgggcttgcagggtcaggtcgacgatccccagcgaatcggccgggaggaaactgttgagcgggaagctgtcggcccggatcgcggcgtcgtaactctgttcgcgggggttgaaccgccccttcacggaaagttcgccgccgtcggccgagagtgtcgaagccgtcgagaacgtccccctgtccgccccggcggagccgcggagccggatcagggccggaatcgccacgcgccgccgcagggccgtgtcggggagcagcgccttgaggaacgcaaggtcccggaagtcgccctcgaagcgggccgacgcctccatccggttggcgtcgagcaggtttttcgccgcggcgtcggccttgaggtcgaggtgtccgggcgacgagatttccagctgcgtctttccgatgtcgcccagagttcccgccgcggagaacgacagccggacggtccggtcgtccagcacgggcgggaccgcctccggggagaggtatttcaggtccttcgtgttcaggtcggccgaaaggacggcgtcgagcggcgaagccggctccagtttcaggattccggccccggcggtgagctccgcccggattcgggagaaggcggtttgcaggtcgaggccggagaggacgatgcccgaggcgtccatgccgaaacgtccggtcaggtcgcggaccgaaagcccgcagcgttcggtgaacgccgtccggcggatttgcagcgcgatgtcggcgccccggttgtacaccgaatcaatcgtgaggtcgagcggcgcgagggcgatgaacgccgggtcgaaccccgcggcgggacggtggcccagccggccgtattcgacgctgttgccggtcagcgcgacgcggccgacccggacggtccatggtgccgacgcttcggtcgtcccggcggaagtcccgctttccgcttcggtcggttcggtgaggtaggagtaggcgccccggtcgagcaggacgcttttcacggagacctgctggctgtccagcagcacccggcaggtgtcgacgctcccgtcggccaggcggacggagagttcggagaccgcaggggaggtccgcatcccgaaggcgaggctcgagaccgcgattctgtcgagtcccaccgtccacggcagggcggcggcgctctcctttttctcggcgggagccgcttcggtcaggttcagccggatgtccgcgtcggcgagaacgagccgggagatgccggccgtgttggccgaaagatcggcgcggacggcttcgagggacaactctcccgcagccaggcgcagatccatgcccgccaaggtgtccttgtagtgggcggcgacgcgttccagcgcgaagctccggatgacgacctctttgcggatcagcggccacagggcggcgtcgagcgagagccttccgcagcgaaggagcgtgtccgtcctgtcggccagcagggtgttgtccaccgtcagccgcagcggaaaggcgaggcggatgcgttcgacggagacctccatgccgagcgtccgggaggcataggcgacggcccgtcgccgggccaggtcctgaacggccggaacatagagcagcgccgggaccagcagcaggacgaggagaatgacgagcagcgtccggagcgtatgtttgagaatttttttcagcatttgtggaaacagcgtgtttcggaatccggcaaaagacaggccgtcggcctgtcttttgcgcgtgcgtgtttgcggcaaagcggcaaaatcgccgcaaattacaaaaaaacgatgatccgtcaatggaacgcgccaaaacaaacgggcctattcgaggcatatcccggcgttctgtccggtctgtccggccggaaacggaggaggcgccggggacggcggggacggtggggacgatggggcgggaagccggagcggctgtcgcaccgggcgggtccggaaaaagaaaaacgtccggccttgtagccggacgtttcggtgcagttcgctgtcattgagcgtctcctggcggagagacaggctcttgaacctttgctatctcaaaatatcacacaattgcaaatacctattaataaccaacttattacaatcataattaaatctaaatattatcgaatatcgctcgctatttcaatttttgggtgtatatttgggtgcggaatttcaaatacacccagtcatgaacatcaaacgaaacatcatttttgcacctgaaagccgcaaaaagaacggcgttccaatcgtggagaacgtacccatccgtatgcgtgtcatatacgcaagccatcgcatcgagtttacaaccggctaccgcattgatatagccaagtgggatgcagacaagcagcgtgtaaagaacggatgtaccaataaattaaagcaaagcgcatccgaaatcaatgcggatttgctaagatactatgccgaaattcaaaacgtattcaaagaatttgaggtacaggaaaccatgccgaccacccaacagttaaaagatgcgttcaatctgaaaatgaaaaataacaacgaggagcagcaggaagatactaaaataagtttttgggagatatttgatgagtttgtcaaggaatgtggcaatcagaacaactggacagaatccacatacgaaaaatttgcagccgtaaaaaatcacctgaaagagttcaaagaagatgtgacttttgagtatttcgatgagttcggactaaacgagtatgtaaacttcctgcgtgacaaaaaagacatgagaaacagtaccatcggcaaacagataggatttctcaaatggttcctgcgatggagcttcaaaaagggatataatcaaaacattgcatacgatacatttaaaccgaaattgaaaaccacctcaaagaaggtaatctttctgacatgggacgaattgaatagattgaaagattatcagatacccaaagacaaacaatatctggaacgtgtcagggatgttttcctgttctgttgtttcacaagtctaaggtattcagatgtccgtaacttgaagcgaagtgatgtcaaatccgaccacatagaagttactaccgtcaaaacggcagacagcctaaacattgaactgaacaaatacagcaaagccatacttgaaaaatacaaggacattcactttgagaacaacatggcactgcccgttatcagcaatcagaaaatgaacgattatttgaaagaactgggggaactcgcagaaatcaacgagcctgtacgggaaacctactacaaaggaaatgagcgtatagatgaagtgacacccaaatacgcattgctcagtacccatgcaggaagacgaactttcatctgcaatgccttggctctcggcatcccggcacaggttgtaatgaaatggacgggacacagcgattataaagccatgaaaccttacattgacatcgcagatgacattaaggcaaatgcaatgaataaattcaaccaactataaaaacaatcagcaagtttcatggtatgcctgttattgggcttatctttgtaactttcaatacatacaacaatgagcaacaacgataacaacatagagaaaagaagtttcgaggctttcgtcaatgccatcggctcggaaatagagcaggcgcaagtccggctcatcagtgcagccaatgcgcagatgctgttccactactggaagatgggcaattacatattgtaccaccagaaccgacaaggctggggcggcaaggtcatcaagagactggcgcaggcgatacggttcagttatcccgaaaagaaaggatattcggtcaggaacttggcttatatgtgccagttcgcacgctcctatccattgggcgcattacggagttttatagaaaccgatacgaaattacttactccaagtgtgcagaaaatcacggatgaacttcaaagcctgaacaatatgacatttgcgcaagagcctcttgcgcaaattcaatcttcagacaacaaggaagttgcaattgtgcaagaacctcttgcacaaattcaggatgtagcccaaacagtcgctgccgcttaccaaatagcgattgaggacatagaaaaactgttcctggcatcacctgttgcaagaatcaattgggcaagccatgtgattctgctgaacagttcccttccgttgggtgtcgattactggtatatgaagcaatccgtggaaatgggttggagcagtaatactcttaaaacgcagattgaaagcaaattgtacgaaaggcaaatcaacagccacaaggtcaataattttaccgccacgcttcctgtgccccaaagcgaccttgccaactacctgttgaaagacccgtatatctttgacttggcgggagccaaagaacgtgcggacgaaagggacatagaggaacaactggtgaagcacgtcacccgttacctgttggaaatgggcaacggattcgcctttgtcgcaaggcagaagcatttccagattggcgacagcgatttctatgccgacctaatcctgtataacataaaactccatgcctatgtggtcgtggaactgaaagctaccccgttcaaaccggaatacgccgggcagttgaacttctacatcaatgtggtggacgacaaacttaggggagagaatgacaacaagaccatcgggctgctgttgtgcaaaggcaaggatgagattgtcgcacaatatgcgctgaccggctatgaccagcctatcggcatcagcgattatcagctcagcaaggctgtgccggaaaacctgaaatcggcactgccgagcatagaacaggtggaagaagaactgacgatgcttcttgacaatgaaaagaacagacaaaagtaggacacctatggcagacaatatacagacgatgattccccgatacggggaactcaacagaatatacagggactatatggacaacagcactttttcttttgacaggcaaaaattcatttccgatttctgtcagcagtacaatgacatgaaatcttttgaagccgccatccttgaactggtgcttgacaggcaaaaagaacaatacaccctgatactcaacagcctgaaaactgaaatagaaaagagcatacaggcttatgaaacacgccccataagtaacagtgccatagagcgtgtctgccatcagcacatggaaaggtattcccttgaaattgaagcccagctggatgtcacaagaagtctgaacaagccgctgaatgaagccaacaacaggtatgattccattggctaccgggaacatactgccgaagaggaaaaacaggcagaaaaagaatatgaacgctgcaaggctgaatatgacagggaaaaagccagactgaacgaactctatgacctgcaaaaggctgcaagaaatgaggcattccaatatatgaagaaccgttgtgcggacatataccgccaaagctgtctttttctggatatattgaagaaatacattcctgacgggaaacgacaggacgagccgggcaaaccggtcagccagcaggaaacaacaacggaacgacacgaatacttcagcatgaaattactttcgctcattcatgaggtatgtgtgggagaacagttcgaagaaatttccgcaccggatttctatgccaacatgaacctgcacccctgcaactgcaagctgaaaaccaaaccgagagagaagatacgtgtatgttatctgatattcctcatgagcgaaaagctccccaaacaggacagggacaaatggaaagccggaatactgaaactgctggatattgatgacagctactacaagtcaaagtacaaggagccagtttctgatttccccagtgacagcaaccagaatttcgccaaggaaatggaacatatattcagataatccgtgatatatcctgattctttacgaaagttccacttttaccactcaaattaatttttgagtggtatttttattttctgatattcaataagatacaacgaaattcggattatatcatccccatccttaccacccgtatccatatctaattttgcatcgttcgagaacagaaataacagccagtgcgcagggctgattgtttaacgactaattagattggactatgacaaatatccaagaattattatccaaacccgtctggcagatgacaggcgaagagttcatcatgttaagcaggcacgcatccggtcagccggaagcgcagccgcagcccgtaacggacacaggcaggaagtatgtgtacggaatactcggcatagccaagctgttcgggtgcagcctgcctaccgccaaccgcataaagaaaagcggaaagatagacaaggccatcacccagatagggcgcaagattatcgtggacgcggaacttgcccttgaactggcagggaagaaaacaggcggacgcaagtaacgggaggaatcactatggactatatgaaagacatccgggaaatatcggacgaacaggcggtaatcctctggcaagcctcacggctgagcctgtcgggaaaatacgagaaagcccctgaaatcctcagtgtgaaaggttccgttatcggcacgttgggaaatttcagcgcatccatcggcaaagccaaaagcaagaagacattcaatgtgtcggctatcgtggcggcggcattgaaaaacggtacggtgctcaggtatgcggctgaacttcccgaagccaaacggaaagtgctttatgtggatacggagcaaagcccccaccactgtctgaatgtgatggagcgcatcatgcgtatggcagggctgcccgatgacagggacaacgaaaaccttgaattccttgccctgcggaagtacacgccggagcagcgcataaggattgtcgaacaggcaatctaccatacgccaaaccttggtctggtgataatagacggcatccgtgacatggtatatgacatcaacagccccagtgaatcgacacgcatcatatcaaagctgatgcagtggacggacgacaggcagatacatatccacacgatactccatcagaacaagggggatgagaacgcaaggggacatatcggcacggagctgaacaacaaggctgaaaccgtgctgctcgttgaaaaggacaagagcaacggggacataagcaaggtttccgccatgcacatccgtgcgatggacttcgagccgtttgccttccgcatcaatgacagggcattgcctgaactgatggaggactaccagacagaaaccaaagcacccggcagaccccaaggtgaaaggttcgatgcctgcaaggacatttccgagcaacagcaccggatagctctggaagccgcattctcgttgcaggacgagtatgggtataaggaactgggcaaggcgctgaaagaatcgtatgccttggtgggcattccgttaagtgacaacaagctggtcaaactcatcacagtgttaaagaacaagcggatgatagtgcaggaaaacggcagaaagtacaggtacgaaccggatttccactattagcccaatcctcgcaatcacttcactttattctccgggtctatatattagaataaagcgaagtggttgcaggagtgcatcaaaccgcttcactttaagccgtatcctatatatacgacaataaagtgaagtggttatacggccagtaacctatatgaaaaggtactggcgaaaagaaaaacaagcaataagcgataaagacaatcatttatggatatacagacagcaaaacaaatcaggctggaagagtatcttcacagcttgggatatagcccggtgaagcggcagggcatcaatctttggtacaaatcgccgttcagggaagaaaccgaagcatcgttcaaggtgaataccgagcggaaccaatggtatgattttgcacttggcaagggcggcaacatcatcgcactggcttcgcacctctatgcaacggacagtgtgccgtaccttttgaaacgcatagaggaacaggcaccgcacgtgcaccccgtttctttctcttttcgcaagcagtcctttacggagccgagtttccaacagttggaaatcgtgccgctttcttcccctgccctgcttgcctatttacaaggtagaggaataaatctggagctggcaaaaagagaatgtagagaagcccgttacacccacaacggcaagcgttactttgccattgccttccctaacggttcgggtgggtttgaggttcgtaacccctatttcaagggctgcatcgcccccaaggaaatctcccacatcagacagtcgggaaaagcaaggactacctgctatgtgttcgagggtttcatggactacctttcctttctgacattgagacaggaaagctgcccgaattatccggaattggacgggcaggactacattgtattgaactccgtatcgaatataaacaaggctctctatccgctgggcaactatgagcgcatccactgctttttcgacaacgaccatgcaggactggaagtactccaacaaatccgcatggaatacggcagagaccgatacatccgggacgcttcgcagatttatggcgggtgcaaagacctgaacgaatacttacagaaacagattgaaagaaaaaggcagctccagtccgccaaaggggtgcgcagccaatcaccggagaagaagaacggcttccggttatagcccactataactacacgctccgctttcgtagttgtgggctctcccgaggggattagggctttgccctaatgacccactcaaggcgtttcacccctgagaaccccgagcaaagagtgaccctctctttgcaatctccgcttatgggttacccctaagaaatctcgtgcaaatgagagcagaggcaagcttgcttgacctatgccgaatgcagccgagattcataaaataacccctctgcgaaagcgagcaaaataatcaattgcaaacaaagaaaagaagctatggcaacaaaatcaagcatacatatcaagccttgcaacatcgcatcgagcgaggcacacaaccgaagaactgccgagtatatgcgcaacatcggcaagtccaaaatctacatcgtgcccgaactcacagccgataatgaacagtggataaatccggatttcggcagtctcgaattgcagacgcattatgagaacatcaaacgcatggtcaaggaaaagacaggccgtgccatgcaggaaaaggaaagggaacgcaagggaaagaatggaaggattatcaaagtggcgggatgttcacccatccgtgaaggagtattgcttatcagaccggacaccacactggctgatgtacgcagattcggtgaagagtgtcaaaagcgttggggcatcactccactacaaattttcctgcacaaagacgaaggacattggctaaacggtcagccggaagcggaagacaaagagagttttcaaataggaagcagatggttcaagccgaactatcatgcccatatcgtattcgactggatgaaccacgaaaccggaaagagccgaaaactcaatgacgaagatatggcaatcatgcagaccttggcttccgatattctcctgatggaacgtgggcaggcaaaagctgtcacaggtaaagagcatctggaacgaaatgatttcatcattgagaagcagaaagccgaactgcaacgtatagaggaaaccaagcgacacaaggagcaacaggtaagccttgccgaacaggaactcaaacaggtaaaagcagagatacgtacggacaaactcaaaagtgcagctaccgatgtagccacagccataaccagcagtgtaggttctcttttcggaagcggtaagctgaaagaactggaacatcacatcgagcagctacatcaggaaattaccaaacgggacaaagctactgatgaattgaaaattcagatacaacaaatacaggaacagcatggcagacaaattcgtaatcttcaaggaatacacaatcaagaacttgaagccaaagacaaggaaatatcacgattgaataccattctcgaaaaagcattatgctggttcccattgctcaaagaaatgctgagaatggaaaaattatgctatgtcactggttttaccaaggggatggttgattctcttttatacaaaaaggaagctctcagatgtagtggaaaaatctattccgaagaatatagacagagatttgaaacaaaaaatgtaattttcaaaattgaacgaagcccgatcgataagaataaattgatgctgactataaaccaacagccaatcagcgaatggttcaaggaacaatgggagaagttacagcagcatctgcgtaactcagtgcagaaagaacaaaaatccagaggattcaggatgtaatatagagaagtacaattcatcatggattgtacttctatcgtaatatatagtacaaaatctaagttgtctaactattctaaagtaaaataagcaataaaagaatatcttattcactattaatataccatattgtcaatatctttccctcatttagtcaatcgtatcttttcgtggtagaaataatttacgataaccggcttgcctttttccgagcgcccgtaaggcaaatcatttattctatatggaaacccctgtgccttggcgtattgggaaatgtcctgttccaatgcctgccagtaatcaagcctctttttgttgtatatttcttcgtataacggaaagaggtcgggatgcttctcacggatatacgtcattatccctcccttgaactgcccgcgcagattcaggttttcgagccatatcaaatcggcatatcctttcactttctcgataatcgccttcatatcggttattccggggaatatgggcgatacaaaacacacggtacggatgcccgcctcatagacctgacgcattgcgttcagacgacgttctatgctcacggcattgtccatatccgtacgaaaccgctcgtcaagcgtattgaccgaccatgacaccgttactttgggaaaacgcttcaacaggtcgaggtcgcgcaggacaaggtcggacttagtgcatatcataatctcggcgttgctcccacgcagctcttcgagcagcctgtgggtacggcaaaattgctcctcatacgggttgtaaccatccgtcacggaacctatcacaatgcgctctccgtcatatttgtgcggattggctatcggtttccagttcttcacgtccagaaatgcaccccacggttctgtatgcccggtgaatcgtttcataaacgatgcgtagcaatacttacaggcgtggggacagcccacgtaagggttgaccgaatatcctccgaccggcagtgaggatttggtcataacgctctgtacgtctatttctttgattatttcggtattcattgtaagcgttttgtaaattgttccggcagttcctgaatcatcctttctttgcccattataggcagcaaatcctctttcataaacacggggacgccctgtgtttgggcttggtcggcaatgtgaagcacccattcgggacgggaatccactttgcctttccgatgtccggtctccgtacctatgacaatccagtcgataccctcgaaatctatatcgccgatttcatcgaaaataggttcgaaagtgacatggtagtgcttggccttgatatttcttttcaaatcgtctagccgctttttttcggaattgcgcgtgacggtcacgcccatccatacattctcgtcatctgtagagaaactgatcttgtccggacatttcgtaaggaatatataagcgtgttgcggattgcttttcattcgtctgaatatttccgcattccattcaggcttccaatcggagaaatcgctcattccggtcatcagccatacgtgaggcttgggcgtgtcgatgatacgcagctttcgcaccatatattccggtacggagaagtcgtccgtaatatggaagcggcggcagttgttacgggcatagcagtagctgcacccgatggagcagcctaccactatgttcatattctttatcagggattttatacagatagtcatctgcttagagttcctttttagaatcatttcggagagactttccattttaccggttctttcagtatgattccgtcagtggcatcctcctgtgagaatgtattgctgcaatattgtatgcagagcatgaggagcggagtcgttccgttgttacggacacttcgttttcctgcaggagataccctgacaacgctaccttcttccactgggaacactgttccgtctacttgaaattcacctttaccggagaggaaaaaataaagttcctcatgactcttgtgactatgcagaaatccggtttctgtacccggggcgaatgactggaaagaaaactcgcttcccgtagttccgagagcggtgctgcagaatacttttccgggaattttcacatccgggccaagctgaagttcgtattcattcagttcattcaacttaccgacactgatcgcggcgaaattctgttctaccgcgattttcctaatctttttcatctttctaatattttgaaatgattgtttatacagttatttaagtgttatgctttctccgtcttccggtataatcagtcggctcatatccgtcccgtgatggcgagcttcgttgcgaaggatggcacgggtggtctggcaatgatcgatggcatccatgtgtacggtaatcagcttgatgtgtggggggagtgtgtcaagcatcgccattacttcctgttcattggggatgatacaaccgtccgtcttagagaattcggggaataccgcaccgccactgttcaccacaatataattaggacgatacttttccacggtagcaagagtacattcttcccatttgcaatcgcccatgatataaatagtcggaagcccttcggacatcagcacatagcccgaaacaggtcccatcatctggcctatctgaccgaaaccgtgatggccaatagcacggtggatggtcagatgacctaaggttatgctctcttcaatcgcttctacatttgagaaaccatctttcaggatggcggccttatcttgtggctgggtgtagaaaggaatgtctttcggcaaatgctgctttacacttggttcgtaatggtcgatgtggttgtgggtgagcagtaccatatcaacaccttcagtaatgtcgctaataggcattacgagatgtaccctcggattcttatatacaccgagagctgattgcagggttcctttgtcggcaaatacggggtcaataagaatggtatgtcctgcatagttgattttcaaggtggcactgcgtaccaaccgaataattgctttttcgttcatgatgttatgttttgtattatttttcgggtacaaagttcgaaaggatatcccaatgtctctatgccttaaaaacaggaatatatgccattttgataaaagaatgatgtatatttgcagaaagcaaaaaacaagagtgatgaaagctataatcaatcccaaaagacttgtaagcgttccgttcaataaaacgcaatgtggcgtagatttctacattaacacaggcgaaagcaaggacatctgtggtgtcttgaccgagcataaggcgtttaagacagattttttcagcttctatttctttcgtcgtgccaatggatatttgttgctgaacttccgaaaagtggagttacgggatggtatggtgctgcttttgtcgccgcaccagcaacaggaatggcacgtgaacgaggtagaactagattacacttttcttattttccgcgaagactttatgcgcacgttcattgctgacaagttcttcgtatatcggctgttgtattattatcagactgatacaccgccctacttgtttgccgagccggaggagctgacggaatatatgcgcctcttaaaaaagataaaacaagaactacaacatcctgtggtagacacttacaacctcattgtgtcagtgctttattatctactggtaattatcaaccgggcatacgctcaaacttatcgtctacctgtcgaagtgccaaaaaacaattacgcattcaaattcaaggacttactcgaaaaacatatccgaacgacacagcgcgttcaagaatatgctgatatgcttcgggtaagtcgtatcaccttgaataattctgtcatggcgcaatttggtgtatcagccattcacttactcaagcaacgtcttttggaagagctgaaaaatgagctactgttctccaatctgaatgtgagccaactggcagacgagttccacttttccgaccccagtcacctcatgcgttttttcaaaaaagaaacaggcaagacttttacccaatatctaatgaattacaaaagaggaatatatgaatagaaatttcatatttggcaaatgaattccatatttaagatatttatttttttgaataactatatttttcgtcataaaggttcattctgccagtccatagaaataccaatcgctttgtaattgacattcttttgaagaatcttaaaaaatacaaaaacacccaattttacattcttgggtgtaaaaaagggtgtaaatctcgcaaatgcttgatttacaccctttattgcggagagagagggattcgaacccccggtacagttgcccgtacaccgcatttcgagtgcggcccgatcgaccactccggcacctctccttttcggtcgcgggaggaggacttgccccgttctcccgacccaaaaccgttgttttgggactgcaaatatagacatattttttattttcgcacattttcgtgcggaaaaaatcacatttggttgaaaaaacgcctccggaggccctgtttctgccgcttttccggaattattcgtacctttgacttcgtcgaagatacgcccgcccggcaaaatgcaggcaagtttgcttttgctttcgccggttcgtatctttgcaaacggacggacccgcttcgcgcatgcagtattttccgtgcgcggccgtttataaagatgaacgatactaaaaccggtacggttttcgtttggtatctgaagaactaacgcaaacattacgtgcgctatgaaaaagttgaaaattttattcggaaccgtcatcctgtccgcaggcctcgcaagctgctcgtcggcttactacgcctcggcggggtatgcttccgacgatctctacgccgtgcatgaccgcgcggagatctcccgcaggaagcaggccgaggccgaggcgcagcgcgctgccgccgaagcccgcagggccgaatgggaggcgcggatcgccgaagcgaaggccgctgccgcggagaatagctattacgaataccgctctgcggacgcaaatccttacgagagcgtgttggccgacgactatgaaagcgcttacgcgcgccgcctgcgcggattcgagtcgccgacctacaagatgccatcgagctacatcaatgcccgctacggttcggccttcaactacgtgtcggcctacgacccggcgttttacaacatcgtggtcatgggcgaccaggtgtgggtggaacccaagtacatcacctcgatgtttggatcgtggggcacggtgatctactccgatccgtggtactacgggtggaacaggccctggggtccgagcttctcgttcggcagctggggctggagcttcgggtggaactcgtggcacaatccctggtacggacccggttggggaccgtggtacagttcgtggtacgacccctggtacggaccgggctggggctggggtcccggatggcacgggcatcatcatggtcccggatgggggccgggctggcacggacggccttatcattcgaacatcgtgcgccggcccaatccctacacgtcgccttcgggaacccgctacggcgtgggatcgcgttccggctcgaaatcgaccgggtcgatgcgcggcggcagcagcggcggccggaacaccttcggcgtgcgcgacaacagcggcgggcggaactcgttcggcggacgctataattcgggcagctcgtcgcgcggcggcagccgatacaacgataacggctaccgcaactccggcggcaacacctacgaccggggcaacagctataacagcggcagttcgtcgtcctacaaccgcggcagttcgccttcgtcgggcggcagttacggcggaggttcgcgcggcgggtcgggtacgacctcttcgggaggcagctaccggaactccggcggacgttaacggttgactttcttaatgtgcaaacgactatgaaacgactgataatcacgcttgcggccgccgcgacggcggccggggcttcggctcagcaatggggcggacttctgatggacaaggacctgctgatgccgaccgatatgatcgaactctcgcagacgcagttcaacttcggcacggcgcgcgccatggccatggcgggggctttcacctcgctgggcgccgacctctcgtcgatgtcgatcaacccggcgggtctgggcatgtaccgccacggcgacatttcgatcacgccgatgatgtccttcgcgcgcagcaagggcaacgccccggagtacgggcgcaattcgcgcgaccgcttttcgatggccaacatcggtgtcgtgatcaacgcttatgagggttcgcgctcgctcatcagcctcaatgtcggcttcggctacaaccgcatcgccgatttcaactacgactatgggttcgtgcggcagaaccagggcgcgaccatcggcgacgcctatgcccgtcagctgaagtgggacggcgtctcgaaaaacaaattttatacgaacggcggttcgggcgactgggtttggccgaacgatccccagtattggaatgcgatgctggcttaccgcgggtttctgatcgaccagaccgatcccgacgatcccgggacgtggaaaccgacatgggtcgggaacaatgcgggcgtcgaccactacacgatgctgcggagcaaaggctcgatcggcgagtatgtgctgtcggtgggcgccaatatcaacaataaaatctacatcggtgcgtcgctgggcatccagagcgtctaccagcgcaagtacatcgactatgtcgaggagtatttctacgatacgccgagccagaacacgcccgatttcggaaattccgggctggactatcagctgctgcgctggaaactcaaccagagcgtgatcgtggacggcacgggcgtcaacttcaaggcgggcatcgtctatcgtccgacggcgaacttgcgtctcggcgcggcgatccacactccgacctactattcgctcgaccggaaattccagagcgcggcggccggactggcctatgccaacaacgataccgatccgaacgtgacgcccgacaagaatggatacatttccacggcgaacgatcccaacatgacctcgccgctgctggtcgacgacggccccaacggctggtcgttcgtctcgccgacgcggctgatgttcggcgcgtcgtacacgttcggcgagcggggcgtgatttcggtcgactacgagcgcgactggtacaacggaatccgcatcaaggacaacccctcggggctggattcgcagtcgtggtacaacgattcgttccgccagaatttcaaggcttcgaacatcgtgcgtgtgggcgccgagttcaaacccctgccggtgctgtcgctgcgtgcgggcttcggttacagcggttcgatggtccgggacgatgagtttccgccggcatcgcccgtcatcaagcagacgacctattacggcgcaggcgtgggattcgtcctgtcccggggcgtgctgctcgacctggcctatcagtacgtgtcgtcgaaactgtcggactactacctgttctatgccgaggacaaggtcgggtacaccgagagcgccctctattcgaccgacatcaaccgtcacaacgtggcgctgacgctcggattccgcttctgatctgtcggcgattttcagaaaagctctctgcaaagggagcttttttcagatggtatccataattcttgattttaattcttaatttttaattaaaatctttaattttgccggataaaacgcaaaattaaagatttagagatatggcaaaggaactgaaagatctcacgaagtccgacgagaactactcgcagtggtataacgacctggtcgtgaaggcgggacttgcggagaactccgccgtccgcggatgtatggtcatcaaaccctacggctacgccatctgggagaagatgcaggctgcgctggacaagatgttcaaggatacgggacaccagaacgcctatttcccgctcttcatccccaaatccttcttctcgaaggaggcccaccatgtcgagggatttgccaaggagtgcgccgtggtgacgcactaccgtctgaagaacgatcccgagggcaagggcgtcgtggtcgatcccgacgccaagctcgaagaggagctgatcgtgcgcccgacgtcggagacgatcatctggaacacctataagaactggattcagtcctaccgcgacctgccgatcctctgcaaccagtgggccaacgtcgtgcgctgggagatgcgcacgcgcctgttcctgcgtacggccgagttcctgtggcaggagggccacacggcgcacgccacgcgcgaagaggctgtcgaggaggccgaaaagatgatccgcgtttaccagaaattcgccgaggagtggatgtcgctgcccgtggtcgtgggccacaagtcgcccaacgagcgtttcgcgggtgccgaggacacgctcaccatcgaggcgctgatgcaggacggcaaagcgctgcaaagcggtacgtcgcacttcctgggccagaacttcgccaaggcgttcgacgtgcagtacgtcaacaaggagggcaagctcgaatacgtgtgggcgacctcgtggggcgtctcgacccgtctgatgggtgcgctgatcatggcccattcggacaacaacggtctggtcctgcctccaaaactcgccccgatccaggtggtgatggtgccgatctacaagacccccgagcagctcgccgagatctgcgcccgcttcggggcgattgccgcagagctgcgcgacaaaggcatcagcgtgaagatcgacgaccgggacaacgtgcgtccgggattcaagttcgccgagtacgaactcaagggcgtgcccgtgcggctggccatgggcggacgcgatctggagaacggcacgatcgagctggtgcgccgcgacacgcttgagaagcagaccgtttcgcaggaagggcttgtggaacgtatcgaggggctgatggccgagattcaggaaaacatctataaaaaggcgctcgcctaccgcgagtcgatgattacgaaggtcgacacgtgggaggagttcaagcgggtgctcgacgagaaggggggcttcctttcggcgcactgggacggcacggtggagaccgaggtggcgatcaaggaggccacgaaggccacgatccgctgcattccggtcgatgcagtcgacgaagagggtgtctgcgtcttctccggcaggccgtcgcatcgtcgggtgctgttcgcccgcagctattgattttcgattttatagggcatttttgcacttgctctcgtgtggcgcaaatgggacgtaccgaagtactacccatctgcgccgcacttcggttaagcgcaaacctgctcctctgaaatcaaaaatagcttggagccgcatttcggttaaattcagtttcgtgataatcgaaaaaaaagcgtatttttgaatttcaatcttttgagcctatgtccagcgaagcggaaatccggaaacgtaaaatctaccgcgtgacctttgtggggttcgtggtcaacctggtgctgtctgtgctgaaacttgccgccggaatcgtcgggcggagcggagcgatggtggccgatgccgtccattcgttctccgacctggcgacggatgtggtggtgatcgccttcgcgcggatttccgccaagccccgggacgacggccacgattacggccacgggaagtacgaaaccctcgccacgatcatcataagcctcgcgctggggatcgtgggggccgggattctcgccggcagcatccgcgacatccgcatcgtggtcgacggcggactgctgccccggccggggctggtggccctcgtggcggctggggtgtcgatcgtcgtcaaggagattctctaccgctacaccgtccgtgaaggccgtgcggtcgacagcccgagcgtcgtggccaatgcctggcaccaccgcagcgacgccctgtcgtcgctggggacgctcgtcggcatcgcctgcgcctattttctgggccagaagtggcgtatcgccgaccccatcgcggcgctcgtcgtggcggtgttcatcttcaaggtggccttcgatctggtccgcacggggctgaacgagctgctggagcgttcgcttccggccgatgtggaggaggagattctgcgcatcgtgacggccgatcccgaggtgtgtcagccgcacaacctgcggacccgccgcatcggggccgcgattgccgtcgaagtgcacgtccgcatggacggggcgatgaccgtggcgcgctcccacgccctgacggtcgacatcgaacgccgcctgcgcgcccgcttcggcgagggcacgatgatcgccattcatgtggagccgctgaaatagcggggcgcggccgggcggaatctcatcggccgcttttgccggttcgccggaggcgcgggccttcattttgtccgcatacgggatgtttctggcacggattttgtttgttttgggcggaaaaaatgtgccggaatattgccggcggagtagaaaaatttggtattttcggaaaaagtgcttatcttgtcaacgtaaagcctccaaaaattccgatgttttcaaggcccgaacaaggaattgtaacgacatcagacaactaaaaaaggatcgcctatcgggaaagaaatctactcttagtaactaattaggagacaagagtatgaacgtgcaagtattaagtgaccaggtattgcttaatcactacctttcaggtgaccgtagtgccatatccaaactcatcgaacgccatagccgcagggtgaaagactacatccacatgatggtcaaggaccgtgatgtggccgatgacattttccaggagacgtttatcaaagccgtccgtgtgatcgacgaaggccgttataccgataacggaaagttcctttcgtggattctgcgcatcgcgcacaaccaggtgatcgaccacttccgcgcacagcggcagaacaaatccgtgagcgagaccgaagccggctacgacgtgctcgggacgctgaagctggccgagcgtacggttgaggattcgatggtctgcgagcagatcgaacgcgacgtgcgcgcgctggtcgaactgctgccctccgagcagcgcgaggtggtgatcatgcgttacttctcgggcttgagcttcaaggagatcgccgaacagaccgacgtgagcatcaacacggcgctggggcgcatgcgctatgcgctgatcaacctgcggcggatgatcaaagaaaaaaatctgatcttgagctgaccccgcacaatattcccgaatgggttgcgttatataaatgcaagcaagttaaaaccaaagcctatggaggatatcgacaaaaacgaggtttcagacaacggcatctccgaggacgaagacttgatgatgcgggaagtgatacaaggtgacgctgatttatgttatctgcaccactatctctcggaagtcttccgaaaaggggataatttttaagggttaatttttgatggggaagggcgccgggaggcgcccttcattttagggctttcaggcccgctttttgttcctcgtctctaaaattgaccgactatgaaattgagtaacgcaagcttgcgggtctgggactacggcaagtgtttccgtttttatgcctgtgaagcccttgccgcaaagggtgtcgggtttgtcgatcgcccgtccgacatacccggttggggagtgcgggccgttcgtttgagagccccggaagagagtcagatcgaacttttcaccttttttggaataatcccatgacacggatacggatcaaacgggtttacgaagcgccggcgccggacgacggctgccgcgtgctggtcgacaggctctggccgcggggcgtacgcagagacgccctgcattgcgacgtctgggccagggaccttgcgccttcggccggactgcgcagctggtatcacgccgaccccggggaccgctgggaggagttccgccgccggtacaccgacgagctgcgtgcgtcgcaggccgtgcgggagttcgtccgcggaatcgaaggtgtggacacggtgacgctgctctacgcctcgaaaaatgcggcggagaaccatgcgctcatcctgcaggagtatttgcagagagctgccggaggggctacaaccgcgtgatcttcgcgattttcgcctcgccctgccccggcagcggctggaagacgatgatttcggcctcgtaggtttcgaggccgggcgtcgtggttttcgccgtgcagatgaagcggtagttggttcccgccacgacctgcgtggcgacgctctccggggtgtagcttacgccggtcatgccggtcgtcgcccggcggaacagttcgcgatcggacgcttcgagaggccgctgcccggtatagccgccgcacaaaatcgttttttcctgttgcttttcggtccgtttttccggacttccgcatgcggtcagcagcatggccgcaagtgctgcaatcgttaatttcaacatcgtcagggcgttttaggtgcgaaaattactgattttccgccgaaaagccaaataaaccgcgtgcaggtgcccggacgccgcggttccgggcctgggcgtttcggtgttttaaggttcggtgtgttatatatgatacgtgtatttttgtgttttatgtccagttttgcaccgttaattgtctgaaatggcgacgggaacagacttttgggccggttcggacatgtgcaaacacgaatcaatttgtgtgtctatgaatatgaataagaagatccttccggcgcttcttttggccgtgtgctgctgggccggagcgtcggcgcagcaggtggctgtgaagaccaatctgctttattgggctgccgcgactccgaatgtcggggccgaggtggccgtcgggaagcattccacgctgggattctcggccaactacaacccctggaccatcggttcggacaataagatccagcattggttcatccgccccgagtaccgttactgggtgaccgagaagtatacgcgcctctttttcggggtacacgccatcggcggcaagttcgaggtcggcggcttcaagcttccgttcatcggcgacaaggtattcaaggggttgcagaccaactattacaaaggttcgttcgtcggcgcaggcatcagcatcggttaccagttttacgtcagcccccactggaacctcgaactttcggccggcgccggactggcccgcctgagctaccatgccgagccggtcagcggcccgaagcgcagctcctacgtcgactccaagcgtttcctgccgatccccaccgagatcggcgtaacgttcgtctacctgttcaactccaagaaataaacgatgcgtcccatgaaaaaatactgcttccttttcgtatttctcgttgcggcgctttcgctccgcgcccagatcgtgggcgatgtcgccgtgacgcgtaaggtgctggccgaacgcggcggcgagctgcacatggtgctggaaatatcggtgtcgcgcaaggccgtgacccgctcgcagagctggacgatcctgcccgagctgagcacccccgaccgcaagtcggtgaaactctttccccacatcctcatcaacggccgctatcagcagcacatgcaggagcgccgccgccgtctttccggcgcctactgggccgagcggcagccctatatgacgatcaatgccgataaaaagaccgatcaggtgttccgttacgagatgaaggtgccctacgagagctggatggccggcgccacgctggtgctgcgcatggttcagacctcgcccggcggcgtcaggcgggtctttacggtcgatgtgaacggtgcggtggacgtttcccgcaagtaaatgcctgcccggatgatgaaacagcgcgaatggatggggtatgcggcggccgttcttgccgcgggcgcattcctgaccgggtgcggaaatatccgcaaactggccaagagcgatcccgaagtgggagtgcacctcccggcccggtcggcacagaaccccgtggcgcaggccgccgatacggcccgcacccagaagatcattacctaccgcaagcaggacggcacggagcttttcattacgcccgtggacgtcgattcgctgtcgggcgagaagatgatgtcggtggccatcgacgaggtggtcatttcggcctcgaaccgccgcaatctggtggagcgcaacggcaagatcaacgtcgagttcgtcgtgtcggtcccgcaggaattgcaggcccggaactggcagctggtcgtcgatccgcagctgctcaagggggcggacacgctggcgttcgatccgctggtttacagcggcgaccgcttcaggacgatgcagcggcgcgaatatgcgcgttacgacgactatctcggacggatcgtcgacagcgcggattacttcgagcggttcggcgacaagagagcctatgcccgctatatggaccgcgtggcggagcagcggacgaagtatgccgacgccgaagcccgtctggaacggatgacgcccgaggaggcgatgttcgacaggcaggtgggatggacgacgcgcggggagcgtcgccggcagtacgcccggctgcgccgctacgtcacggcgaccgaccgcaaggtgcgggaacggacctcctacacgccggacgccagcgacaagttcgaccatctgaacgactattttgcgccgcgttaccggcatgcctatacgggcgacgacgtgctgcccggcggcgggatctacacccgcgtgcagggcgaatacccggtcgacgggggccgtgagcgcgaggcttacatccgttcgctgacggagaatccggggcgcgtttacggcgaggtctatacggccgacgatgccgggatacgcgcgctggcgggccggcggctcgcctacacggggctgcgccgtccggaggtcgaagggctgctgcgcgaaaccggagacagcgccgcccgtgagaattaccgcatccgcaaggagtatgccgccgaccgtctggcggcgctgaacgccctcgatacggcggaggtgcggcgcggcatgctgcgcgaaggagagctgcggcgcaattacgagcgggccgtgaacagtcctgcggctttcgcgcgcctggtgcgccatccctattatgccgacgcacggctcgacacggtgatctgccggcccgacgggcggatcgactattattacaccgagcaggtgcaggccgacgaaaacacgtcgaaactctatctctgtctggccggggaggtcgaggaccggagcggccgcacgcaccggatcacccggtcggacacgctgacctacaacgtggcctcgatgaccacgttcctcgacgaaacgacgcgctacatgcagcgcatcgtgctgcgcgacgccgaggccaacgcgcgcttcttcttcaccttcccgtcgggcaaatcgacccttgtggacacgctgaccgcaaatcgccgtcagatcgccgccgtgcgttcgctgacgcgcggcctgatgaccgatccggtctacatcatcgacagcatcacgctccgcgccacggcttcgcccgagggaacctggcaggtcaacgagcggctggcccgcgaacgcgccgaggcgctgcgccgggtgctcgtgtcggagttccgcacgctgtacgactcgcttcgggtgtcgggcagctatacgctcgacgagaacggacggcaggtgctcgacaggtctgccggggagcagcttcccgacctgccgaacctgctgcgcacgaagtggctggccgaggactgggacgaactctaccggctggtagctgccgacacgctgatcgccgacaagcaggaggtgctggccatgatgaagtgggagggcaatcccgacacccgcgaatggcgtatccggatgaaatatcccaaggcttacgagcgtatgcgccgggtgatctacccgcagatgcgcgctgtggatttccggttcaacctccaccgccgcggcatgaagcaggatacggtctacacgaccgaggtcgatgccgagtacatgcacgccgtggagctgctcaaaaagcggcggtatgaggaggcgctcacgatcctgcgtccctacgaggaccgcaatacggcgctggcctacatgtcgctggggtacgatgccgcggcgtaccgcattctgcgcgccgagccggacgccgcttcgacgcccgacatccagtacatgctggccatccttgcgtcgcgtctgggcgacgaggagcaggccgtgacctatttcctgcgctcggtggaactgcgcgagaacctgaagttccgcggcaatctcgatcccgaaatctcccgtctgatccgcaaatacgggttgttccgggaggatttcgaatagatgccgccggagagatgaaaaccgggacgctcccacgagggagcgtcccggttttttcgtcgccggacgtgtcagcggtcgctgtggaggcagtgctgggcgttgcggagctggagggccagcgagaaggccgtgatgccggccaggagcagcgtgatgccgacccagacgatgacggccgtcgtgccgatgaccagcggctggaacagaatccacagcgagcagagcagcagcagcacgcccgtgaagatggtccagcccgaaccggcgatctccagggcgctcatgtcgccgcccagtccgatggcgctgaaaccgcgcatcatcagccagaacccgaggaagatgggcagcgtggcggccgaaagcccgacgttgaagatcaggatgatgccgaggatgatctcgatgatccctccggccatcatccagccgcggcccgtgatgaagtgtttgttggccgaggagagcacgacctccaggatgcccgaaatcagcatcagccatccgaagacaagcgacatgcccaggtagctctgggcagggtagacgaaaatcagcacgccgaccgcgaagagcgcgatgccgatgatcaacagcagccaccagtagcggacggcctgtttcgaattttcgatcagtgaggaaaagttgttcatggtatgaggaatttcttcctctcggagcaatttgcgtaccagagccgtcgggccgcatacgcggaaaaggccggacaatcagccggatgccgggcagggaagccgcggggcgcagggacgggtttcggattgacgaggcgggaccctgattagcggggcagggttcgggttggcggtccggggcggactgggttgccgggatacggtggggcggggagaaccgtttcgccgatttcgggacggagatacctgctgtttcgaagcgcatccgtcatctttttcaaagcggagaactggagcgcgaggcgactgtttccgaaatggttcgtccgctcatctggaaagagatcatatttatatatagtatattttattccatccttgtttttggtttggcggagcagtttcgaagcggtcgctctgcccgatttcgccgtcggtctgaagtgcgaatctgttcttaaaatgcgcattttgcaagacttttttatgcatttagagcgtaattgctgatgatttttttgcgaaaaattaattaggataaaatttttttattatttttgcgacagagagaatcctctttcctcgtcaaatcgcgagggggggggatttttccttggcgccgttctcgtgtcaagtcgataaaatcccgaaaactcgataagtaatttttctggaatccgttcagggtttcattttgtagattgtatcgactgttttaagtatggcatttcattatgcttatcacatccgaaagccaaaccgggaagccggttcattaaatctcatcctatgaaaaagttgtacctatcctttctggccatgctttgcatggcaggagcgtccgtactgaattcatgttcggacgacgattccacttcatccggcaaccccgacatgccagaaagcgggaatgccctgatctgcaacggtgtcgtacgggaaatcaaatccgccgtctactcggtcgagacacccggaaacggcgaaaaggcagatgcttcggaagcagcctctgtctatacgatctatctttcgccgacggcagggcttgtggatgtggatggcatgctgatcgccgacgatgccgtcaaaattaccgtcaaacaaccttccggagctgtcgatcttacggctgccggcaacggaatcgtttatggggagatcgacgtgaactcctcgaacgtcggagaagcctcgaaagcggatctctcggtcgagttcctctcggcccgcgtcgcccgcatttcggccgcaatcgaaaccggcggaaaaacgctgacggtcgcctattacggactgtgcaagaattccgacgcttcggaggagggagatgatgcagacaaggtgttgctggataaagttccgctgtcgtggtacctcggcccggtcaagggcgtggagtcgcacaactattatatggccttcacggatgccgagcataccgtatccaaagggcgggtgacgctcaaagaggcgggttaccttttcgtggccgacctctatgcggttccgggcgaagatgcctacacgcttcccgagggtgaatatatggccagccagctcaacgaggatcacacgttcacgtcccaatataccggtgttcagtatatcgacgccgaaggcaataaaacccagttgtcgctggtttcgggagagccgttgaaagtcacccgcgaaggcgacatctggagcatttcgctccgtttcgtcgatacggacggttccgaaaagagcatcgtctacgagggacagctccagatcgtcgatcagccggaggacggcggcttctacctgccgcagatcggacgcgacgtggaagtggtcggattcagcgccgccgcgacctattacggcaacatgctcgaagcaggtaccggcatgatgcagatcaacatttacgacgaaacctacgacacggaggaggggcagggcggtctcgccgctgcgctcgtcgtattcaacgacctgttcggcaatccgaaggaagccgtgatcaagccccacgaatatctggccaacacctcgttccaatgggggtcgtggatgcccgccgtggaaattccgatggagggactggtattcccgctcggcacttatgtccagttggacgacggaacctctttcggacaattttcctacggaaaggagggcatcatcaagatcgaggccgccggtacggcccaaggcgaagacggcaaaatagaaccggtatacaagatcgagttcaacctcacctcgaaggacggctttaccctcaagggctcgtacaccggagtcattccgatcaccgacgcatccgacgacaagtccgatgacgacggcacctcgacgctcgagcgtgactacgacatggatctgtcgaagatcaaaaaggcgcattactatacttcggatcaggtctatatccaaggcatcggctacaaaccgatcagttcctacggatgcggtctgcaattcatcaatatcggtatcgaatgggtaggagaccatctcgaagacttcgtggatcgcgagccgggcggtgacatcgtccgtgtggaacttaccaccgagccgggcaaggagaacgaaatcactccgggaacctacgaggtgaccgaacagcgctggccggcatacatcaaacccggcgtcatgatgcgcggcattatgctggacggcggtctgcatggcagccggtggatgcaccagacttattcgatgtggggagatgacaacaagatcttcgaatacatggacggacacgccctgctctacgacggtcaggttacgatcaccaaggtcgagggcgaaggcaaggagaactggtaccggttcgaggtcgacggcatctgcgtgcgcaagcatcatgtgcgcggaacgtgggaaggccctgtcgtaagccaaacggggcgtgctgcggcagagaaggatcatctcgaaccgcccagactgcttcgccgcctgccggctccgtcggttccgatgagccgtctggccgaagaactgccgggcatcatgttccgcaaggccggaatgaccgaatgacaacagaaaaaccggatagcgcggggtttccccgaaccccgcgctattaaaaacaatcgttatgaaaaactcgacccattacagactgcgcgcattggcgtgcgcgttgctcgcatcggcagccatgctgggtgcatgcgatgacgacgatcccaacgacgaccccgaccccgggaagaagcctcccgtaactctgaccgatcaaatccagtacgacggaggcgatctcgtcggcatcaagtcggcgatctatgtcgctgaagaagacggcagccacaccttttacctctcgccgaccgaggggctgatcaatgccgagcagatgaaacaggccgacgattatctgcgcgtgatggtggagagccccaagggcaccgtgaacacggcctccgatccgttcgaaatcgaatacaaggatatttcggtgaaaaagacgacgatgaacgacgtcgcgagcgtagagctctccgcagatctggtgacgaagacccggctcaatctctatacctatgtcgaattgaagagcggcaagacgctgatcgcccgttaccagaatacctgtacggaagagcgtgacgtcgaactgacgaaccaatacgagatcgacaatcggatcgccgccgtcggaagcgtcgtcgagtggcgcaatgtccgcgaaggcaaccgccgcttctgcctctacgagcaagagggcctggccgctcccgaggagggggctgcgggcgtggagattctgcttgccgaggagctgttcggaacggcggaaatcgaccttgcgacagctgatcccgcgaaggtgcagattcgctgcggtgaattcgcaacgggcgccgggacgaccggaacgctgacggcgaagtacctgacggataaattcggcacgatcgaggggctcatcgtcgcgcttgacgcttcgaaagacgggaagcgcctgcgtgccgcctacgaaggcacgttcgccggaggctatgcggccaccaatacgatcaaggtgacggagccggcagccggaggcgaggctgcggccgcagccgaggccccgatcgccgcgctcttctcgcaggagccgcaggtcggcagctacgtattcgctttgggcgatgccgaaacggccgcagccccggccgatctcgccaaaggtcattgggctgcgtatgtgcgggtgctggcggccaagttcgacggcgtgatcgacgttgcggcgcagacctccgattactggttccggctctacgaccacaagacctatcagacctactacggcgaggatgcgggactgaccggtacgatcgagacccatcccaatcccgctggcggcaaggagatttatctgcgggtaaatctgacgctgaaaaacggcatcggggtcgaagccgaatactacggtgtgccgacggctgcgacggccgacgcaatggatgaagaaacattgaaacccgtcaaaccgttcgagccctatatcaaattcctggacaaggataacaaggacatgctgtattggcccgttacggcgatggaggtgcggcacgacccggcttatcgggatagttataccggcgatctgctatcgggatattgcttctatttccggaatgctttcaccgagagtatcgatgcggataatactactccgatgtttttcctgccggacagctacctcgaccatgaaggagagatcgacctgcctgcggaaggcacgaattgcaaatggaacctcaggttccagtatatgtatctgtcctcatataacgggtacggatattccgacaaggataagtactgcatgcggtgtcccgagaaggcggcagtaaccgtcaagcaggagaataaggagtggatcttcaaattctcgatggtcgattggggagtattcagtacatggaaccctgatccgaccggaaccggaaacaccttgatcatcgaattccggggcaaggctgccaagtattcgggctcgaagccgaacgaccttgcagacgatttctacaaattgcgatccggccggttcggtgaccggacaggcggatgacagccccccccctccctccgggcttccggaaggggaggggatatgtttcggctccgggccggaacacgaagacggcaaattttctacaatcaatttttttaccagcgttaaaatggcgcatttatgaccaaaaaaatctttctatcattgatggctgttctcggcctgctcctgtccgcccatgcgcaggaacgggaaattacgggttcggtcaaagatcatgcgggggccggcatcgtcggcgccaccattctggtcgaaggcactacgaagggtacgacctccggtgcggacggcagtttttcgatcaaagccgcaccggacaatgtgctggtcgtgtcgttcatgggttatcagtcccacacgatcaaggtggggacgcaaacccggatcgacgtcgtgctgaaagagaacacacaggctatcgacgacgtgatcgtcgtagcgttcggtacggcaaaaaaggaggctttcaccggttcggcgaccgtcatcaaatcggacgacatcgccaagtcgcagcagtcgaacgtagcgcaggctctggccggaaaggtcgcgggcgtgcagctgaccaacacctcgggacagccgggagagagtccgaaaatccgcatccgcggcttcagctcgctcaacgccggcaacgatccgctctggatcgtggacggcatgccctactcgggtgacctgaacaacctcaatccgagcgacatcgagtcgatgaccgtgctgaaggacgccgcctcgaactcgctgtacggcgcccgcggcgccaacggcgtggtgatgatcaccaccaaaaaggccaagtcgcaggaggctcacgtgacaatcgacgccaagtggggcgtcaattcgcgcgccgtccaggattatgcgtacatcaccaacccggcacaattctacgaactgcattacagtgcgctgaaaaactactatgtcaattcgggaatgagtatcggcgaggcccatttgcgcgccaatacgaatttgacggccaatgcgaatgacggaggtctgggctatatggtctatacggttccttccgggcaggagttcatcggcatcaacggtaaggtcaatcccgctgcgactctcggccgccgtctcgtctatgagggcaaggagtactacatccgtcccgacgactggaccgatgcggctttccgctcgtccctgcgtcaggagtacaacgcttcgatctccggccagaccgggaacgcctcgatctacggatcgttcggctatctgaacaacgaaggtatcgcctacaactcggacatggaccgttatacggcccgcctgcgcgtggactatcaggccaagaagtggctcaagttcggcgccaatgccaactacacgcatttccgctacaaccagatcgacgacagcggcgccggtaactcgtcgggcaacgttttcgcttatacgacggccgtcggtccgatctatccgctctacatccgcgacggcgagggtaatgtcatgtacaacgaggacggcatcaagctctacgactacggcaacggcgacaatgccggtatggagcgttcgctcttccccaacagcaacgccctctcggattcgcgtctcaacaaacaggaagccgaaggcaatgctttcaacggtacgggatatatcgacgtcaccttcctcaaggatttcaagttcacgttcaacgccggcgtttcgctcgacgaaacccgctccacctcggttacgaatccctggttcggacagttcgccagcgaaaaaggcatggtctcgaaagggcatcagcggaatttcgacctcaacctgcagcagattctcaactacaccaagcagatcggccaccataacctcaatgtgatgctgggtcacgagtcctaccagaaccgcatttacttgttgtcggcttccaaaagcaacatgctgacgcaggacaacgacgaactggccggggcgatcatcgacaaacagggagccggctcctaccggagggagtacaacaacgagggctatttcgcccgcgtcatgtacgattacgcaggcaaatatttcgcctcggcctcctatcgccgcgacgcttcttcgcgtttccaccccgaccatcgctggggtaacttctggtcgctgggcggcgcatggatcatttcgaaggaaaatttcatggagagcacctatgaatggctcgacaatctcaagctgaaggcctcgatcggctcgcagggtaacgacaacatcggtaacttccgctacacgaacacctacacgatcgaaaacgccaacggaaaggtctcgaccgtcttcaacgccaaaggatccgagaacatcacctgggagaccaactccaacttcaacgccggtgtggagttcagcttcctgcgcggtacggtttccggaggcgtcgaatatttcctccgcaagacgaccgacatgctgctgtcgttcccggtagctccgtcgctgggctattcgtcctactacgccaacgtgggcgacatgcgcaacagcggcgtcgaaatcgagctgaactttacgccgatccggcgggagcatatccagtgggacatcaatctcaacatgacgcacctgcgcaacaagatcaccatgctgccttctgaacggcggaccaagcaggtcgatggctactccggttacgtgaacggctccactttcttcggagaaggactgccgatgtacactttctacatgagaaaatatgccggggtttcggacgagggcctttcgatgtggtacatggacgaaaccgacgacaagggtaacccgacgggcaagcgcgtcacgacgactgaatatgccaaggcatcggactatctctgcggcgacccgattcccgatctctacggcggtttcggcacgagcgtcaatttccggggcttcgacttgagcgtggccttcacctaccagatcggcggtctggcctacgactcgggctatgcggcggccatgtactcgccggccaacaagacgacgggtatgaactggcacaaagacatgctcgacgcatggtcggcggacaatacgtcgtcgaacatcccgcgtttgcagtatgaagataaggatcaaaacggtatgtctgatcgcttccttatggacgccagctacctgaacctgcagaacatcaacttcggctacacgctgccgtcgaatttcaccaagaaggtcggaatcgagaaggtgcgcgtctaccttgcctgcgagaatgtctggtactggtccaaacgtcagggattcgatccccgctactcttattcgggagcgacgagccaggccacctattcgcctgtaagaacgatttcgggcggcatcaacatccaattctaatcggcctcaaacactttacgacaaacgacatgcatatgaaaaaagcgacaaacataacgctcgcgacgctggcggcagctttgctggcaagcagctgcatcaaagaagccgacccctatgaaatagccaccgaggatcaggtcaccctcgaaacgctgatcgaaggcattccggcctcgctcgtacaggccggttccgcaggctatgcaaaggatggccaagcttgggattttgccctgccggccatccatatcgccacggaatccatgacgggcgacgtcgccatcggcggcaatatcggttacgactggttcgcacagtggggaaccaacgaagcgctcggcgccgactatgccgtgggtgcactcacgtgggacaactactatgcgtggatcatggcggccaacaacgtcatcaaacagatcgacgcctcggatttcgcgacgctcgacgccacgcagaagtcctatctgggcttcgcctacgcctatcgggccatgttctacctcgatctggtgcgtctgtacgagttcaaggagaacaattacaccgaagcgcccggggttctcgggctgggcgtgcccatcgtactgcccgagactaccgaggccgaggccaagaacaacccccgtgtcaaggtcgacgacatctacgatcaagtgatcttccccgacctggacaaggccgaagaactgttgagcggctttacggctcccgacaagtatacgatcagtccggcgctggtctacggactgaaagcccgggcctggcttgagcgcggtacggccaagaacgacgccgaagcctatgtttccgctgccgagtacgcccgcttggccattaacgccagcggctgtacacccctgacgcaggagcagtgggaagacccctcgaacggcttcaacagcgccatgtcgaacaatgcctggatctggggccttgcgcttccgagcgagagcgttgccaacctgttctgcttcacggcgcacatgagtacggagaatgcgtggagcgcctacggaaacgacgcctgccgctgcatcaacagcaacctctacaacagtatcgacctgcgcgacttccgccgccattcgtggctcgatcccgaccgcaaagacccggagaaggagtcctacgactacaaaagctgccgcaaagagggcaaggaatacttcaatgaactgcccgattacgcgaacatcaagttccgtccggcgcagggcgcttatgaggatttcaaggtcggcggagccgcagaccatccctacatgcgcgtcgaggagatgtacttcatcgaggccgaggccaaggcgcatgaaaatcttggcgaaggaattcggctgctcaatgagttcatgaacaattaccgcattgtgggcggaggttacgactgtacgaacatgtcgtcgtcggttgaaaatttcaccaacgagctgatgcttcagaagcgcatcgagttctggggcgaaggcatcgtcatgttcgacatgaagcggctcgacatgtccacccgacggggctatgtgggaaccaactctcctgcctcgtaccggctgaatacggaaggccgtgcaccctactggaacttcgtgatctcgcgcggtgagacgcagaacaaccccgtcatcgccacgcagaacaatcccgatccttcgcaaacggtcaagccgtggaacgggtgatgaccatctgcgatcaagctgtcaaatctaaaagcaaattaccgtgaagacattcaagcatatattaccgttcctgctggcacttcttgtccttgccggctgcgaggacgacgtgaactatacgcagggaaccgcggagaatcccgattgctacggtgtctacttcccgaagaagcaggctacccggaccgatctggagttcgaaccgggaacccagaccgaagcgacctatacggtcaaacggcgcaacaccgtggatccgatcgtcgttccggtcgtcgtgaagtccaacgtcgaggatattttcgtcgtcgagccgatcgcattcgatgccggagaggacgagacgacctttacgatcagtttccccggagcccaaatgggcacgacctacacctgcgatatcaacatcgaagatccgcgctacgcttcgatctacggtgccgataaggtgaacctttcgatatcgctcgtgctggccaaatgggaattggtcaccaacgaaaagaccggtgagaccaaaggccgctaccgcgacgacattctgggcaacttcgcgtcgatagacaaccccaatgctaatccgaaccccgaaatcgaactcgaaatctacgagcgttcggacaagaagggctattaccgcatgaaagcctacactccggagctgatgaacatcttcgccggaggacaggtaaaccacgagaaccgcaacgtctggacctatgtcgatgcctcggatccgaacaaggtctattatccctaccaatcgaccggtctgaccctctttgccgatatgggcgagtggtacatcgcatcgcaaacaccggaaaatttcgccatggacgaatcggccggacaatatggcacgctcaagaacggcgtgattaccttcccggcgcagggtatcgtgctcgaaccgagcgaaggtgaatatgccggaaaattcttctatgccaacgcaaacggcctgcagcggatcatgcttcccggagccagggtctacgactactcggtggccctcaccaaaagcgaacccgcagatggtgtcgtcgaaatcggcgccaccctctccgaggacacccgagagttccgctatgcgatcttcacgggcaatttgagcgacggcgaggcgagcctcaaggcacaggagatggccgatggcaagatcgccgcggaactcatcaagacgatcaccgcttcggggacgatttccgttcaggatctggaaggcggcaccggcaagtacacgcttgtaggctgcatctacggttcggacgaagaggcgaatccggagggcggcgaaacggcgtcgcagaatctgaaaatgcagggctacgcttccatttcgttcggatatatcgccaagggcgacgaggacaaggtttccgtcattctcaacatcgggctcgaagccacgaacgaattcgcgggacaaggcattacgacggacaatgcggcgaaattctgggcctatggcgaggggattgaatctgtcaaacacggagtcttcaagacaaaagacatccaaggattggacatgacggctttcctcaaagaggagggcaaggatttcaccaaagagcagctcgacgccatcaacggcggacattacagcgtcatgctcacggggctgaacggcgacacggagtacacgttcgccggactggcttacaacggatatgccagcaaactcttcacggcatccatcaagaccaccggcaaatacaacccgggattggagagcgagttcctctactcggacttcctgccgcagaaagagcagccctcgaaggagtacctgatttcgaccgaatggaactattatgctgtcaacgtcatggatgagaagccgatgcgccggaagatcggcacggtgaccatcgaagacgatccggcggacgacagttcggccgatctgctgaccatcacgggactccccggggtcgagttcgacgaaggcggtcggattccggcggtctacgttccctccactgctccgctcgcaggcataaccggcgctatctccccgcttctttcgcaaacgccgatcggtgtcatcaacggagaggacatcctcgccggctgcgtctcggaggagaaccccgaagccctctatgcggtcaattatccgttcatcggaggcgccgtggccgacggttacatctatttcgtgcccaccccgaactatgtcgagcagggggccacgttccgttatctgtatacgttgagtacgacgaccccctattcgatccttacggatatgttgctcgtcgatcccgccaaggatatgggcggcattcccgaactggccgcagagcggattgcagaattgcgccgaatggccgcaggactccggcagccgcggaattacgtcgaacggctcgaattctccgtttccgcagaacgcggttccgtcaaaaccgtaccgaccgactatgcgaaaggattcctgcccgcatcggctcctgaagcgaaagtcgtaagggctacggtcggattcagcgacgctgtgcagcgtgcgaacggttcgggatcggaactccgcttccggaaaacggccgctgccgaaatcacgctcaagtaatatcggatcgggagaggccggtcgtccggcaagtgtcggcctctcccttttttccaagccaaaaacaacctgccggactcaaaaatcagcatgatatatgcataacaaaacgaaactcctgattttcgcctccctgctgctggccgcctgctcgacggatcccatgcaggaaataccgaaccgcggggattccgctcccgaaatcgagacttcgggcaaaatctgcaatacgtcggacgacgccgtggccggttcgctcatcgtaaaatttggcgaagaagccattcccagtctcgaacagaatgcgttgaatgcggccaagacccgttcggcgctgacccgttcgggcatcgaatccgtcgatgacatcctgaacgacctgcacgtcacctcgctggagcgcgtcttccccgaagccggcgaacacgaggcccgcacccgtgcggcagggcttcacagatggtatgtgctcgggttcgcatcggaagaggatctcgacaaggcggccgagagactcgcaggtgtcgccgaaatctcgaaagtacagttccgcacccgtctctaccgggcttccgactgcaaaacctatccgtttcaagcaacggcgaacggccagacccgcgctttggttacagcggatttcaacgacccgaatcttttctggcagtggcattacatcaacaatgccgaccaggccgttgccactacatcggtggccggagccgacatcaatgtggccgacgcatggaagctcacggcaggtaatcccgaagtcatcgtcgccatcgtggacgaaggggtgaaatacactcatccggatctggcggccaacatgtggatcaatccgaacccttcgcccgagtacgggaagcaggatatacacggatggaacttcgtcaccgacggtcccatttcatgggggcagaagggcgattcgggacacggaacgcacgttgcgggcacggtagccgccgtcaataacaacggcatcggcgtctgcggcgtggccggaggtacgggcaagggagacggtgtgcgtctcatgtcgtgtcagatcttctcgggagacctgacgggtgacgccctcgtgtcgagccgtgccgtaaaatacgccgcggatcacggtgcctccatcctccagtgctcgtggggcatcaaggcgggaatatacacgtcggacaacatgttcatcaaacaatcgccgatggattacgaggcgcttcagtacttcgccgcccagaagaactgcgaggccctcgacggcggactgatcattttttccgccggcaacgaatcgacagccatgtccggctatccggcaggctatcgtgattatatctccgtcacctcgttctcgcccgactacctgccggccaattataccaactacggttccggctgtaatatcgcggctcccggcggcgaaacgagcggtctgagcggcggcgagaaggccggcgtactctcgacactctgctccgaaacgagcaacggagcggattacggctacatgcagggaacctcgatggcctgcccgcacgtctcgggcgtagccgcactcggcctctcctatgccctggagaaagggaagagatactcgctcgacgaattcaagaccatgctgctcacctcggtcaatgaaatcgactcccggctgggcgaaggctcgaaggccacgatcgccgacgtgtcgatttaccgcggcaaaatgggcaccggcattacggacgcttatcagttgctcatgcagatcgaagggacgccctgtctgcaggtcgcattgggcgaggtgcagctcattccgctgacgcagcatttcgggcagggtgccgaagaccttacctacaccgatatccagatgtcggccaaggacatggaaaagcttggcatcaaggcggctcccaaaatgtataatggaaaactgatgatcaaatgcacgaaacccggatcggccaaaatcaaggtttcggcgatagccggcggtacgaaacccggaacgggtgtcgtgatgggcggcatggtcatcaccaaggaattcgccgtcatcgcccgttcggccggcgcagcaaacggaggttggttataaaaacagtgcttgcaatgaaaaaacatctttatcatctgctcgttttctccctgctcggcattttcgccgcaagctgttcggatgacgacgatgcccccaacattcagtcggaaatcgtaggcgaatggcgcctcacttcctggtcggagagtgctcccgaaggattcgaggtatacgtcgaattcacttcggcagcgacgttcggactttatcagaaggtcgaaacgtcgaactacaccaaatacaccgggcgttattcgatcgacggatcccggctgaccggagtgtacgacgacggcgagagctggggcaacggctacgatttcgagttgacgaatggcgggaacaccctgacgatgaccacccgaaccgagccggccgaaaccagcgtatattcccggacgatcattccggatgacgtgcgcaatgcccgaacgtcccgtgccgaatcttctctggaaatgaggcgaatgctataatctgtaatattcgcgccgctccgccattaagtgtaaggtaaggacaagaagatgcggttgaaacgctaataacggtcagaccagtaacgcttcaatgtgtggaaggcatttgtcaaccgacaaataatttcgagtgaaaatctcttactataatgtgttaaaacattaaaatagaaagttcaaaattacgagattgctcactgggataggatggctaaagccatcctatctttttttagaatatttctacgagaactggtattgacgacaaaataataaatatggcgatttccggcgagaaatccaaatgtggaaaaattttgaaaggcgaataattacaagttgtatgatttgaatcggatgatgcgatccggataatatttttcgaccgatgcccgattttcagcgatgtgaaggtgaatttcagatatttgtttatgtggttcgggtttcatatctttgtcttacctaacttcaaattatttttgttatgaaactgaaaatgtattttctgatgctcgctttaggagtatgcggagcggctatgcaaagttgtgatgacgatgatgacaacttgaaagttcccgaaaaattgcagtctgcgttttctcaaaaatatcctgaagccagtccgaaatggaaaacccggggtaattattacattgcggatttccaggaccagaattatgaatccgaggcctggtttactttcgatgccgtttggctgatgaccgaaacggacctgccttatgcggctttgcccgaagccgtcaaaaacgccttccagaacagcgaatatagatcgtggaggccggatgatgtggatatgatagaacgtgaaagcatggaaccggtctatgttttggaggtggagcagggctcgcgggaaatggatctttattacaacgcggagggaattctgatcaaggcggtggaagattcggaggatgattccgaggattacctgccggttgaacttcccgaaggggtgaaaaattttctgcaggagaaatatgcggcatccgaaatcgtagaaacggaccgggaacacggacagtttgaggtggatatcatccacgacggagttgccaagaaggtgctttttgacaacaacggaaattggctttccacatcctgggagatcagtccggatactcttccggaagccgttaaaactgcgatccagcaggcaattaacgataattatgtcggttatgaagccgacgatgagccgggaatggtagaaacaccagatgggaattattatcgaatcgagctggaagcggaagatggcagggaggtgattctcaaaatccgggaagacggcactttgctgaaatagattcgtttgcataggcatgccgacaggcaaatgaaaaattcgcttggcagctgttcgtattatatcatctgttttaatagaacgatttacctatgaaaaaaatcggtttgctgctattttttgcggtattcgcttgctctttgtccgcacaaaacaggctttccgtctttatcggaaatgccaatcggtatgcttcggtcgatttgtcggatttctgtcggcgcctctgcgtggaatacgatatttcggcagaatcgctcaataattattaccggcgttgcggcagagattgggggcatgtgggccttgcgctggagatcgcccgaacctcgggacgaagcatgcgcgatatctgtgattattacagacgttataagagtgagggctgggggcggattctgatcgaactgggaatcggtcccgagtcgtcgtattgtgctccgttctatgatcgggtgcattgtcatagcgattactggcacgagcattacgactcctattgcaaacgacatgggaagtatcatccgcacaagcacgggtataagaaacacccgaaatatgggaagcggaaatacgggagatatcatgacgatgattacgacgatgacgaggatgatgacgattgagtggccggtgataattccatgtaaatcgttatacgtataattgttttatgaaaaagattttattggtttttgtttgcagtttgttcgctttcgagacggttttggctcaagagaaaaacgccgtgggattacggttgggagatggcgtggaatttctttatcaacgcgatctttcgtctcggaattttttgcaattcacgttggcgactcctcattttgaaggactgtccgttacgggaatctataattggcgctgctgccggtggaattggacaccccggacttgcgattggtatctgaatgccggtgtgggtggagccttggggctttatgactttgacgattcgggttttttactcggtctggccggctcctgcgctttcggctgtcatttcaaaaatgccccgatctctttggaggtggattaccgtcctgtgatcggagccgtgatcggcggtggacatgacggcttctttgatcccggattctggaatttcggattgtccgtcaaattccatttttgaaactatgaatgatcgttatatattcttaatagccgtttaagcaggaacgactatccgacgaatctctgaaaacaaattcgccaccgccggaacaatctggcggtggcgaatttgtgaaaatgaatttattgaatgcgacttttgtccggtcatacatggaattttacaacaggtgtccggtagccgcctgagactccggtttctgttcccgacaacatcggccggtatcctttcgataactgcgttgtcataatggattcaaatgaataggttcacgttcgctttcccggcacgctccatgtaggtggcaacaccgcctacggtcacgttgtccagcaattcttcgcgctggacgcccatcacctccatcgacatctggcaggcgatgaattccacgccgttgtcgatagcctgccggcgcagcgtttcgagcgagtcgattcctttccgcttcatgatgcggcgcatcatccggttgccgatcccgaacatattcattttcgaaaggtgtaatttgagcgatgacgacggcagcatcatgtcgaacatgcgtccgaagatgtcctttttcgtcttcggtttggcgattttcttgatgtgtctgtcccgtcctgaaaaaggtttacaaaaaagagtaaatcttatgcagcaaaaaacgaattcagacttatcgcgtcattatttaccgcgtcagttgcgtcatctgattttacaggagtatttgagcggagtcaagacggctcgccaactctccgaagaacatggtattcccatgtctacgattcataagctgggtcagcgctggaaagcgaaaaatagttgtagctttgtgagtacccctaatccttatccgatcatgtcccgcgttacgaggaagaagccagtgaactgttatccgagaacaaagcccttcggcggcacttggaagaggctttattacgtctggaaggctatgagatcatgggagatatcctccaggaagatacggtgtcgacctgctaaaaaatccgcagccggacagtccggcgcctcaaagaaagacacacaggaataagcctgtcgtttccgtgcgggttgttcggctatgctcgtcaggcctaattataaacatctacggcgtaatagggaaggagtcttatcctatatccttcttttagagcgggtgggttgctaccggaaactgatgcccaggctcggcggtcgtaaactgtggcatttgctacaacaagacggatttccggtcagccgggatcggttatttacgctgctttcggaaaacaatcttctggtcaaacgtcggaagaaatacagcgttacgacctgctcgcggcactggatgcgtaaatatccgaatctgatccggggtttcgacctcgagcggccgcatcgtttatgg

SEQ ID NO: 44 - RNA, 1521 nt, Alistipes shahii
  source 1..1521: mol_type = rRNA
atggagagtttgatcctggctcaggatgaacgctagcggcaggcctaacacatgcaagtcgaggggcagcacggtgtagcaatacactggtggcgaccggcgcacgggtgcgtaacgcgtatgcaacctacccataacagggggataacactgagaaattggtactaataccccataacatcaggaccggcatcggttctggttgaaaactccggtggttatggatgggcatgcgttgtattagctggttggtgaggtaacggctcaccaaggcaacgatacatagggggactgagaggttaaccccccacattggtactgagacacggaccaaactcctacgggaggcagcagtgaggaatattggtcaatggacgcaagtctgaaccagccatgccgcgtgcaggaagacggctctatgagttgtaaactgcttttgtacgagagtaaacgctcttacgtgtaagagcctgaaagtatcgtacgaataaggatcggctaactccgtgccagcagccgcggtaatacggaggatccaagcgttatccggatttattgggtttaaagggtgcgtaggcggtttgataagttagaggtgaaataccggtgcttaacaccggaactgcctctaatactgttgaactagagagtagttgcggtaggcggaatgtatggtgtagcggtgaaatgcttagagatcatacagaacaccgattgcgaaggcagcttaccaaactatatctgacgttgaggcacgaaagcgtggggagcaaacaggattagataccctggtagtccacgcagtaaacgatgataactcgctgtcggcgatacacagtcggcggctaagcgaaagcgataagttatccacctggggagtacgttcgcaagaatgaaactcaaaggaattgacgggggcccgcacaagcggaggaacatgtggtttaattcgatgatacgcgaggaaccttacccgggcttgaaagttactgacgattctggaaacaggatttcccttcggggcaggaaactaggtgctgcatggttgtcgtcagctcgtgccgtgaggtgtcgggttaagtcccataacgagcgcaacccctaccgttagttgccatcaggtcaagctgggcactctggcgggactgccggtgtaagccgagaggaaggtggggatgacgtcaaatcagcacggcccttacgtccggggctacacacgtgttacaatggtaggtacagagggcagctacccagtgatgggatgcgaatctcgaaagcctatctcagttcggatcggaggctgaaacccgcctccgtgaagttggattcgctagtaatcgcgcatcagccatggcgcggtgaatacgttcccgggccttgtacacaccgcccgtcaagccatggaagctgggggtgcctgaagttcgtgaccgcaaggagcgacctagggcaaaaccggtgactggggctaagtcgtaacaaggtagccgtaccggaaggtgcggctggaacacctccttt

SEQ ID NO: 45 - RNA, 917 nt, Gemmiger formicilis
  source 1..917: mol_type = rRNA
naacccataaattgctttcaaaactgctggccttgagtagtgcagaggtaggtggaattcccggtgtagcggtggaatgcgtagatatcgggaggaacaccagtggcgaaggcgacctactgggcaccaactgacgctgaggctcgaaagcatgggtagcaaacaggattagataccctggtagtccatgccgtaaacgatgattactaggtgttggaggattgaccccttcagtgccgcagttaacacaataagtaatccacctggggagtacgaccgcaaggttgaaactcaaaggaattgacgggggcccgcacaagcagtggagtatgtggtttaattcgaagcaacgcgaagaaccttaccaggtcttgacatccgatgcatagtgcagagatgcatgaagtccttcgggacatcgagacaggtggtgcatggttgtcgtcagctcgtgtcgtgagatgttgggttaagtcccgcaacgagcgcaacccttattgccagttactacgtaagaggactctggcgagactgccgttgacaaaacggaggaaggtggggatgacgtcaaatcatcatgccctttatgacctgggctacacacgtactacaatggcgtttaacaaagagaagcaagaccgcgaggtggagcaaaactcaaaaacaacgtctcagttcagattgcaggctgcaactcgcctgcatgaagtcggaattgctagtaatcgcggatcagcatgccgcggtgaatacgttcccgggccttgtacacaccgcccgtcacaccatgagagccggggggacccgaagtcggtagtctaaccgcaaggaggacgccgccgaaggtaaaactggtgattggggtgaagtcgtaacaaggtagccgtatcggaaggtgcggctggatcacctccttt

SEQ ID NO: 46 - RNA, 790 nt, Gemmiger formicilis
  source 1..790: mol_type = rRNA
attgtaaactcctgtcgttagggacgataatgacggtacctaacaagaaagcaccggctaactacgtgccagcagccgcggtaaaacgtagggtgcaagcgttgtccggaattactgggtgtaaagggagcgcaggcggaccggcaagttggaagtgaaaactatgggctcaacccataaattgctttcaaaactgctggccttgagtagtgcagaggtaggtggaattcccggtgtagcggtggaatgcgtagatatcgggaggaacaccagtggcgaaggcgacctactgggcaccaactgacgctgaggctcgaaagcatgggtagcaaacaggattagataccctggtnccccttcagtgccgcagttaacacaataagtaatccacctggggagtacgaccgcaaggttgaaactcaaaggaattgacgggggcccgcacaagcagtggagtatgtggtttaattcgaagcaacgcgaagaaccttaccaggtcttgacatccgatgcatagcttagagataagtgaagtccttcgggacatcgagacaggtggtgcatggttgtcgtcagctcgtgtcgtgagatgttgggttaagtcccgcaacgagcgcaacccttattgccagttactacgcaagaggactctggcgagactgccgttgacaaaacggaggaaggtggggatgacgtcaaatcatcatgccctttatgacctgggctacacacgtactacaatggcgtttaacaaagagaagcaagaccgcgaggtggagcaaaactcaaa

SEQ ID NO: 47 - RNA, 501 nt, Gemmiger formicilis
  source 1..501: mol_type = rRNA
ttagtggcgaacgggtgagtaacgcgtgagtaacctgccctggagtgggggacaacagttggaaacgactgctaataccgcataagcccacggcccggcatcgggctgagggaaaaggatttattcgcttcaggatggactcgcgtccaattagctagttggtgaggtaacggcccaccaaggcgacgattggtagccggactgagaggttgaacggccacattgggactgagacacggcccagactcctacgggaggcagcagtgggggatattgcacaatgggggaaaccctgatgcagcgacgccgcgtggaggaagaaggttttcggattgtaaactcctgtcgttagggacgataatgacggtacctaacaagaaagcaccggctaactacgtgccagcagccgcggtaaaacgtagggtgcaagcgttgtccggaattactgggtgtaaagggagcgcaggcggaccggcaagttggaagtgaaaactatgggct

SEQ ID NO: 48 - RNA, 1306 nt, Gemmiger sp.
  source 1..1306: mol_type = rRNA
aaaaggatttattcgcttgaggatggactcgcgtccaattagctagttggtgaggtaacggcccaccaaggcgacgattggtagccggactgagaggttgatcggccacattgggactgagacacggcccagactcctacgggaggcagcagtgggggatattgcacaatgggggaaaccctgatgcagcgacgccgcgtgaaggaagaaggccttcgggttgtaaacttctgtcgtacgggacgataatgacggtaccgtacaagaaagccacggctaactacgtgccagcagccgcggtaaaacgtaggtggcaagcgttgtccggaattactgggtgtaaagggagcgcaggcggactagcaagttggaagtgaaatctatgggctcaacccataaattgctttcaaaactgccggtcttgagtagtgcagaggtaggcggaattcccggtgtagcggtggaatgcgtagatatcgggaggaacaccagtggcgaaggcggcctactgggcaccaactgacgctgaggctcgaaagtatgggtagcaaacaggattagataccctggtagtccataccgtaaacgatgattactaggtgttggaggattgaccccttcagtgccgcagttaacacaataagtaatccacctggggagtacgaccgcaaggttgaaactcaaaggaattgacgggggcccgcacaagcagtggagtatgtggtttaattcgaagcaacgcgaagaaccttaccaggtcttgacatccgatgcatagcacagagatgtgtgaagtccttcgggacatcgagacaggtggtgcatggttgtcgtcagctcgtgtcgtgagatgttgggttaagtcccgcaacgagcgcaacccttattgccagttactacgcaagaggactctggcgagactgccgttgacaaaacggaggaaggtggggatgacgtcaaatcatcatgccctttatgacctgggctacacacgtactacaatggcgtttaacaaagagaagcgataccgcgaggtggagcaaaactcaaaaacaacgtctcagttcagattgcaggctgcaactcgcctgcatgaagtcggaattgctagtaatcgcggatcagcatgccgcggtgaatacgttcccgggccttgtacacaccgcccgtcacaccatgagagccggggggacccgaagtccgtagcctaaccgcaaggagggcgcggccgaaggtaaaactggtgattggggtgaagtcgtaacaaggtagccgtatcggaaggtgcggctggatcacctccttt
